(19) United States
(12) Patent Application Publication
(10) Pub. No.: US 2023/0312684 A1
(43) Pub. Date: Oct. 5, 2023

(54) NEUROPILIN AND ANGIOTENSIN CONVERTING ENZYME 2 FUSION PEPTIDES FOR TREATING VIRAL INFECTIONS

(71) Applicant: PINETREE THERAPEUTICS, INC., Cambridge, MA (US)

(72) Inventors: Ho Juhn SONG, Cambridge, MA (US); Euijoon JEONG, Cambridge, MA (US); Anthony John ROSSOMANDO, Cambridge, MA (US); Sung Hugh CHOI, Cambridge, MA (US); Clemens REINSHAGEN, Cambridge, MA (US); Yongbin TAK, Cambridge, MA (US); DeLuna XAVIER, Cambridge, MA (US); Chikwamba KUDZAI, Cambridge, MA (US)

(21) Appl. No.: 18/040,083

(22) PCT Filed: Aug. 2, 2021
(86) PCT No.: PCT/US2021/044135

§ 371 Date: Jan. 31, 2023

Related U.S. Application Data
(60) Provisional application No. 63/059,915, filed on Jul. 31, 2020.

(51) Int. Cl. C07K 14/71; A61P 31/14; C12N 9/48

(52) U.S. Cl. CPC C07K 14/71; A61P 31/14; C12N 9/485; C12Y 304/17023; C07K 2319/30; A61K 38/00

(57) ABSTRACT

The present disclosure relates to fusion protein compositions and methods of reducing and treating viral infections. The fusion proteins include a polypeptide comprising a b1 domain, or a derivative or fragment thereof, of a neuropilin; an ACE2 domain, or a derivative or a fragment thereof, of an angiotensin converting enzyme 2; and or an immunoglobulin domain. Both the b1 and ACE2 domains are capable of binding to a coat protein of a virus selected from the group consisting of herpesviridae, papillomaviridae, coronaviridae, flaviviridae, togaviridae, bomaviridae, bunyaviridae, filoviridae, orthomyxoviridae, paramyxoviridae, pneumoviridae, and retro viridae. In some embodiments, the b1 domain, or a derivative or fragment thereof, and/or the (ACE2) domain, can be used to specifically bind S proteins of COVID-19 particles.

### CROSS REFERENCE TO RELATED APPLICATIONS

[0001] This application claims the benefit of, and priority to, U.S. Provisional Application Ser. No. 63/059,915, filed on Jul. 31, 2020, the disclosure of which is incorporated by reference herein in its entirety.

### SEQUENCE

[0002] This application incorporates by reference in its entirety the Sequence Listing entitled “268824-494885_ST25.txt” (980 KB), which was created on Jul. 30, 2021 at 12:21 PM, and filed electronically herewith.

### TECHNICAL FIELD

[0003] The present disclosure relates to fusion protein compositions and methods of reducing and treating viral infections, and more specifically, polypeptides comprising a combination of neuropilin-1 (NRP1) domain, neuropilin-2 (NRP2) domain, angiotensin converting enzyme 2 (ACE2) domain, and/or an immunoglobulin domain that can be used to specifically bind a coat protein of a virus particle such as a S protein of a COVID-19 virus.

### BACKGROUND

[0004] Coronavirus disease 2019 (COVID-19) is an infectious disease caused by severe acute respiratory syndrome coronavirus 2 (SARS-CoV-2). As of Jul. 27, 2020, more than 16.1 million cases have been reported across 188 countries and territories, resulting in more than 647,000 deaths.

[0005] Common symptoms include fever, cough, fatigue, shortness of breath, and loss of smell and taste. While the majority of cases result in mild symptoms, some progress to acute respiratory distress syndrome (ARDS) possibly precipitated by a cytokine storm, multi-organ failure, septic shock, and blood clots. The time from exposure to onset of symptoms is typically around five days, but may range from two to fourteen days.

[0006] The virus is primarily spread between people during close contact, most often via small droplets produced by coughing, sneezing, and talking. The droplets usually fall to the ground or onto surfaces rather than travelling through air over long distances. Transmission may also occur through smaller droplets that are able to stay suspended in the air for longer periods of time. Less commonly, people may become infected by touching a contaminated surface and then touching their face. It is most contagious during the first three days after the onset of symptoms, although spread is possible before symptoms appear, and from people who do not show symptoms. The standard method of diagnosis is by real-time reverse transcription polymerase chain reaction (rRT-PCR) from a nasopharyngeal swab.

[0007] There are currently no vaccines nor specific antiviral treatments for COVID-19. Management involves the treatment of symptoms, supportive care, isolation, and experimental measures. The World Health Organization (WHO) declared the COVID-19 outbreak a public health emergency of international concern (PHEIC) on Jan. 30, 2020 and a pandemic on Mar. 11, 2020.

### SUMMARY

[0008] In some aspects, the present disclosure provides a polypeptide comprising: a b1 domain, or a derivative or fragment thereof, of a neuropilin; and an immunoglobulin domain, wherein the b1 domain is capable of binding to a coat protein of a virus selected from the group consisting of herpesviridae, papillomaviridae, coronaviridae, flaviviridae, togaviridae, bornaviridae, bunyaviridae, filoviridae, orthomyxoviridae, paramyxoviridae, pneumoviridae, and retroviridae.

[0009] In other aspects, the present disclosure provides a polypeptide comprising: an ACE2 domain, or a derivative or a fragment thereof, of an angiotensin converting enzyme 2; and an immunoglobulin domain, wherein the ACE2 domain is capable of binding to a coat protein of a virus selected from the group consisting of herpesviridae, papillomaviridae, coronaviridae, flaviviridae, togaviridae, bornaviridae, bunyaviridae, filoviridae, orthomyxoviridae, paramyxoviridae, pneumoviridae, and retroviridae.

[0010] In still other aspects, the present disclosure provides a polypeptide comprising: a b1 domain, or a derivative or fragment thereof, of a neuropilin; and an ACE2 domain, or a derivative or fragment thereof, of angiotensin converting enzyme 2, wherein the b1 domain and ACE2 domain are each capable of binding to a coat protein of a virus selected from the group consisting of herpesviridae, papillomaviridae, coronaviridae, flaviviridae, togaviridae, bornaviridae, bunyaviridae, filoviridae, orthomyxoviridae, paramyxoviridae, pneumoviridae, and retroviridae.

[0011] In yet other aspects, the present disclosure provides a polypeptide comprising: a b1 domain, or a derivative or fragment thereof, of a neuropilin; an ACE2 domain, or a derivative or fragment thereof, of angiotensin converting enzyme 2; and an immunoglobulin domain, wherein the b1 domain and ACE2 domain are each capable of binding to a coat protein of a virus selected from the group consisting of herpesviridae, papillomaviridae, coronaviridae, flaviviridae, togaviridae, bornaviridae, bunyaviridae, filoviridae, orthomyxoviridae, paramyxoviridae, pneumoviridae, and retroviridae.

[0012] Embodiments of these aspects of the invention directed to toward polypeptides comprising a combination of two or more domains including a b1 domain, or a derivative or fragment thereof, of a neuropilin; an ACE2 domain, or a derivative or fragment thereof, of angiotensin converting enzyme 2; and an immunoglobulin domain, may include one or more of the following optional features. In some embodiments, the b1 domain, or derivative or fragment thereof, comprises the amino acid sequence of SEQ ID NOs: SEQ ID NO: 3 (NRP1 b1) or SEQ ID NO: 11 (NRP2 b1). In some embodiments, the b1 domain, or derivative or fragment thereof, comprises the amino acid sequence of SEQ ID NO: 3. In some embodiments, the polypeptide is capable of binding to a coat protein of a coronaviridae virus. In some embodiments, the polypeptide is capable of binding to a coat protein of COVID-19. In some embodiments, the coat protein is an S protein of COVID-19. In some embodiments, the b1 domain, or derivative or fragment thereof, comprises a mutation that enhances the affinity for an S protein of COVID-19 when compared with the unmutated b1 domain. In some embodiments, the b1 domain, or derivative or fragment thereof, comprises a mutation at a position selected from the group consisting of E319 and K351. In some embodiments, the b1 domain comprises the amino acid sequence of any of SEQ ID. NOS: SEQ ID NO: 4 (NRP1 b1 E319A) and SEQ ID NO: 5 (NRP1 b1 K351A). In some embodiments, the polypeptide contains a plurality of b1 domains, or derivatives or fragments thereof. In some embodiments, the b1 domain, or derivative or fragment thereof, further comprises a linker, a b2 domain of neuropilin, or a combination thereof. In some embodiments, the b1 domain, or derivative or fragment thereof, is selected from the group consisting of SEQ ID NOS: SEQ ID NO: 7-SEQ ID NO: 14. In some embodiments, the ACE2 domain, or derivative or fragment thereof comprises a sequence selected from the group consisting of SEQ ID NOS: SEQ ID NO: 38-SEQ ID NO: 39. In some embodiments, the polypeptide comprises a plurality of ACE2 domains, or derivatives or fragments thereof. In some embodiments, the ACE2 domain contains a mutation at a position selected from the group consisting of F28, D30, and L79. In some embodiments, the ACE2 domain, derivative or fragment thereof comprises the amino acid sequence of SEQ ID. NOs: SEQ ID NO: 40-SEQ ID NO: 43. In some embodiments, the polypeptide further comprises a linker between the b1 domain and ACE2 domain. In some embodiments, the linker is selected from the group consisting of SEQ ID NOs: 44-50. In some embodiments, the immunoglobulin domain comprises a Fc domain. In some embodiments, the immunoglobulin domain consists essentially of a Fc domain. In some embodiments, the Fc domain contains a mutation that reduces ADCC when compared with a wildtype Fc domain. In some embodiments, the mutation is at position N297 as determined by KABAT numbering. In some embodiments, the Fc domain contains one or more mutations that enhances affinity for a FcRn when compared with a wildtype Fc domain. In some embodiments, the mutation is at a position selected from the group consisting of T307, E380, and N434 as determined by KABAT numbering, or combinations thereof. In some embodiments, the Fc domain contains a mutation that reduces affinity for Fcγ receptor subtypes when compared with a wildtype Fc domain. In some embodiments, the mutation is at a position selected from the group consisting of L324 and L325 as determined by KABAT numbering, or combinations thereof. In some embodiments, the Fc domain is selected from the group consisting of human IgG1, human IgG2, human IgG3, human IgG4, and human IgA. In some embodiments, the Fc domain comprises the amino acid sequence selected from the group consisting of SEQ ID. NOs: 23-31. In some embodiments, the Fc domain sequence comprises the amino acid sequence of SEQ ID. NOS: 23, 30, or 31. In some embodiments, the polypeptide has a configuration selected from the group consisting of: a (b1), IgG1 WT, ACE2-1 polypeptide; a (b1b2), IgG1 (T307A/E380A/N434A), ACE2-2 polypeptide; a (b1b1)-(G4S)*2-(b1b1), IgG1 (N297A), ACE2-3 polypeptide; a (b1b2)-(G4S)*2-(b1b2), IgG1 (L324A/L325A), ACE2-4 polypeptide; a (b1b2)-(G4S)*2-(b1b2) with b1 (E319A), IgG1 (N297A/T307A/E380A/N434A), ACE2-5 polypeptide; and a (b1b2)-(G4S)*2-(b1b2) with b1 (K351A), IgG1 (L324A/L325A/T307A/E380A/N434A), ACE2-6 polypeptide. In some embodiments, the polypeptide comprises the amino acid sequence selected from the group consisting of SEQ ID. NOS: 88-110. In some embodiments, the b1 domain is attached to the C-terminus of the Fc domain. In some embodiments, the b1 domain is attached to the N-terminus of the Fc domain. In some embodiments, the ACE2 domain is attached to the C-terminus of the Fc domain. In some embodiments, the ACE2 domain is attached to the N-terminus of the Fc domain. In some embodiments, the polypeptide further comprises a signal peptide. In some embodiments, the signal peptide comprises the SEQ ID NO: 51.

[0013] In some aspects, the present disclosure provides a method of producing the polypeptides disclosed herein, the method comprising recombinantly expressing a nucleic acid vector encoding the polypeptide in a host cell.

[0014] In some aspects, the present disclosure provides a pharmaceutical composition comprising the polypeptides disclosed herein and a pharmaceutically acceptable excipient.

[0015] In some aspects, the present disclosure provides a method of reducing COVID infection, the method comprising the administration of the polypeptides disclosed herein to a subject in need thereof.

[0016] In some aspects, the present disclosure provides a method of treating a subject suffering from COVID infection, the method comprising the administration of the polypeptides disclosed herein to a subject in need thereof.

[0017] In some aspects, the present disclosure provides a method of preventing COVID infection, the method comprising the administration of the polypeptides disclosed herein to a subject in need thereof.

[0018] In some aspects, the present disclosure provides a method of reducing symptoms of a COVID infection, the method comprising the administration of the polypeptides disclosed herein to a subject in need thereof.

[0019] In some aspects, the present disclosure provides a method of reducing transmission of a COVID infection, the method comprising the administration of the polypeptides disclosed herein to a subject in need thereof.

[0020] In addition, the present disclosure describes a recombinant polypeptide comprising: (a) one or more mutant neuropilin (NRP) domains, or fragments thereof, and (b) an immunoglobulin domain; wherein the one or more mutant NRP domains result in reduced binding of the recombinant polypeptide to heparin or heparan sulfate relative to a wild-type NRP domain.

[0021] In addition, the present disclosure describes a recombinant polypeptide comprising: (a) one or more mutant neuropilin (NRP) b1 domains, NRP b2 domains, or fragments thereof, and (b) an Fc domain; wherein the one or more mutant NRP b1 domains, NRP b2 domains, or fragments thereof are derived from an NRP1 or an NRP2 protein; wherein the one or more mutant NRP b1 domains, NRP b2 domains, or fragments thereof have one or more amino substitutions selected from groups consisting of: K373E, K351A, E319A, K358E, R513E, K514E, K516E, R513A, K514A, K516A, Y297A, S345A, and Y353A, relative to the wild-type amino acid sequence set forth in SEQ ID NO: 1; and wherein the one or more one or more amino substitutions result in reduced binding of the recombinant polypeptide to heparin or heparan sulfate.

[0022] In addition, the present disclosure describes a recombinant polypeptide comprising: (a) one or more mutant neuropilin (NRP) b1 domains (b1), NRP b2 domains (b2), or fragments thereof, and (b) an Fe domain; wherein (a) and (b) comprise a construct having an orientation of: b1-Fc; b1b1-Fc; b1b1b1-Fc; b1-Fc; b1b1b1-Fc; b1b2-Fc; b1b2-Fc; b1b2-Fc; b1b2-Fc; Fc-b1b2; Fc-b1b2; b1-Fc-b1; b1b1-Fc-b1; b1-Fc; b1b1-Fc; b1b1b1-Fc; b1-Fc; b1b1b1-Fc; b1-Fc; b1b1b1-Fc; b1b2-Fc; b1b2-Fc; Fc-b1b2; Fc-b1b2; b1-Fc-b1; b1b1-Fc-b1; wherein the one or more b1, b2, or fragments thereof, are derived from an NRP1 or an NRP2 protein; wherein the one or more b1, b2, or fragments thereof have one or more amino substitutions selected from groups consisting of: K373E, K351A, E319A, K358E, R513E, K514E, K516E, R513A, K514A, K516A, Y297A, S345A, and Y353A, relative to the wild-type amino acid sequence set forth in SEQ ID NO: 1; and wherein the one or more one or more amino substitutions result in reduced binding of the recombinant polypeptide to heparin or heparan sulfate.

[0023] In addition, the present disclosure describes a recombinant polypeptide comprising: (a) one or more mutant neuropilin (NRP) domains, or fragments thereof, and (b) an immunoglobulin domain; wherein the recombinant polypeptide is operable to bind to virus having an —Z₁-X₁-X₂—Z₂- (CendR) motif, wherein Z₁ and Z₂ are arginine or lysine, and X₁ and X₂ are any amino acid.

[0024] In addition, the present disclosure describes a recombinant polypeptide comprising: (a) one or more mutant neuropilin (NRP) b1 domains (b1), NRP b2 domains (b2), or fragments thereof, and (b) an Fc domain; wherein the one or more b1, b2, or fragments thereof, are derived from an NRP1 or an NRP2 protein; wherein the recombinant polypeptide is operable to bind to virus having an —Z₁-X₁-X₂—Z₂- (CendR) motif, wherein Z₁ and Z₂ are arginine or lysine, and X₁ and X₂ are any amino acid; and wherein the virus is selected from the group consisting of: Dengue; respiratory syncytial virus (RSV); Hantavirus; Epstein-Barr virus (EBV); EBV (uncleaved); SARS-CoV-2 Wuhan; SARS-CoV-2 Wuhan (uncleaved); SARS-CoV-2 UK; SARS-CoV-2 India; SARS-CoV-2 India (uncleaved); HCoV-OC43; MERS-CoV; MERS-CoV (uncleaved); Herpes simplex virus (HSV) 1; HSV 1 (uncleaved); influenza A H5N1 virus (IAV H5N1); human papillomavirus (HPV); Human Metapneumovirus; and human immunodeficiency virus (HIV).

[0025] In addition, the present disclosure describes a recombinant polypeptide comprising: (a) one or more mutant neuropilin (NRP) b1 domains (b1), NRP b2 domains (b2), or fragments thereof, and (b) an Fc domain; wherein the one or more b1, b2, or fragments thereof, are derived from an NRP1 or an NRP2 protein; wherein the recombinant polypeptide is operable to bind to virus having an —Z₁-X₁-X₂—Z₂- (CendR) motif, wherein Z₁ and Z₂ are arginine or lysine, and X₁ and X₂ are any amino acid; and wherein the virus has a CendR motif selected from the group consisting of:

GTCTQSGERRREKR;
KNTNVTLSKKRKRR;
LTHKMIEESHRLRR;
VSFKPPPPPSRRRR;
VSFKPPPPPSRRRRGACVVY;
CASYQTQTNSPRRAR;
CASYQTQTNSPRRARSVASQSIIAYTMSLG;
ASYQTQTNSHRRAR;
ASYQTQTNSRRRAR;
ASYQTQTNSRRRARSVASQSIIAY;
GSGYCVDYSKNRRSR;
LLEPVSISTGSRSAR;
LLEPVSISTGSRSARSAIEDLLFDK;
ERPRAPARSASRPRR;
ERPRAPARSASRPRRPV;
VLATGLRNVPQRKKR;
PTTSSTSTTAKRKKR;
IDMLKARVKNRVAR;
AKRRVVQREKR;
and
AKRRVVQREKRAVGIGALFLG.

[0026] In addition, the present disclosure describes a recombinant polypeptide comprising an amino acid sequence that is at least 90% identical to an amino acid sequence set forth in any one of SEQ ID NOs: 113-116, 121-122, 133-137, 148-149, 154, 162, and 193-201, or a pharmaceutically acceptable salt thereof.

[0027] In addition, the present disclosure describes a recombinant polypeptide consisting of an amino acid sequence that is at least 90% identical to an amino acid sequence according to set forth in any one of SEQ ID NOs: 113-116, 121-122, 133-137, 148-149, 154, 162, and 193-201, or a pharmaceutically acceptable salt thereof.

[0028] In addition, the present disclosure describes a recombinant polypeptide consisting of an amino acid sequence set forth in any one of SEQ ID NOs: 113-116, 121-122, 133-137, 148-149, 154, 162, and 193-201, or a pharmaceutically acceptable salt thereof.

[0029] In addition, the present disclosure describes a method of limiting the occurrence of, reducing the risk of, reducing the severity of, or treating a viral infection, in a subject in need thereof, said method comprising administering to the subject a composition comprising a therapeutically effective amount of a recombinant polypeptide comprising: (a) one or more mutant neuropilin (NRP) domains, or fragments thereof, and (b) an immunoglobulin domain; wherein the recombinant polypeptide is operable to bind to virus having an —Z₁-X₁-X₂—Z₂- (CendR) motif, wherein Z₁ and Z₂ are arginine or lysine, and X₁ and X₂ are any amino acid.

[0030] In addition, the present disclosure describes a method of limiting the occurrence of, reducing the risk of, reducing the severity of, or treating a viral infection, in a subject in need thereof, said method comprising administering to the subject a composition comprising a therapeutically effective amount of a recombinant polypeptide comprising: (a) one or more mutant neuropilin (NRP) b1 domains (b1), NRP b2 domains (b2), or fragments thereof, and (b) an Fc domain; wherein the one or more b1, b2, or fragments thereof, are derived from an NRP1 or an NRP2 protein; wherein the recombinant polypeptide is operable to bind to virus having an —Z₁-X₁-X₂—Z₂- (CendR) motif, wherein Z₁ and Z₂ are arginine or lysine, and X₁ and X₂ are any amino acid; and wherein the virus is selected from the group consisting of: Dengue; respiratory syncytial virus (RSV); Hantavirus; Epstein-Barr virus (EBV); EBV (uncleaved); SARS-CoV-2 Wuhan; SARS-CoV-2 Wuhan (uncleaved); SARS-CoV-2 UK; SARS-CoV-2 India; SARS-CoV-2 India (uncleaved); HCoV-OC43; MERS-CoV; MERS-CoV (uncleaved); Herpes simplex virus (HSV) 1; HSV 1 (uncleaved); influenza A H5N1 virus (IAV H5N1); human papillomavirus (HPV); Human Metapneumovirus; and human immunodeficiency virus (HIV).

[0031] In addition, the present disclosure describes a method of limiting the occurrence of, reducing the risk of, reducing the severity of, or treating a viral infection, in a subject in need thereof, said method comprising administering to the subject a composition comprising a therapeutically effective amount of a recombinant polypeptide comprising: (a) one or more mutant neuropilin (NRP) b1 domains (b1), NRP b2 domains (b2), or fragments thereof, and (b) an Fc domain; wherein the one or more b1, b2, or fragments thereof, are derived from an NRP1 or an NRP2 protein; wherein the recombinant polypeptide is operable to bind to virus having an —Z₁-X₁-X₂—Z₂- (CendR) motif, wherein Z₁ and Z₂ are arginine or lysine, and X₁ and X₂ are any amino acid; and wherein the virus has a CendR motif selected from the group consisting of:

GTCTQSGERRREKR;
KNTNVTLSKKRKRR;
LTHKMIEESHRLRR;
VSFKPPPPPSRRRR;
VSFKPPPPPSRRRRGACVVY;
CASYQTQTNSPRRAR;
CASYQTQTNSPRRARSVASQSIIAYTMSLG;
ASYQTQTNSHRRAR;
ASYQTQTNSRRRAR;
ASYQTQTNSRRRARSVASQSIIAY;
GSGYCVDYSKNRRSR;
LLEPVSISTGSRSAR;
LLEPVSISTGSRSARSAIEDLLFDK;
ERPRAPARSASRPRR;
ERPRAPARSASRPRRPV;
VLATGLRNVPQRKKR;
PTTSSTSTTAKRKKR;
IDMLKARVKNRVAR;
AKRRVVQREKR;
and
AKRRVVQREKRAVGIGALFLG.

[0032] In addition, the present disclosure describes a method of limiting the occurrence of, reducing the risk of, reducing the severity of, or treating a viral infection, in a subject in need thereof, said method comprising administering to the subject a composition comprising a therapeutically effective amount of a recombinant polypeptide comprising an amino acid sequence that is at least 90% identical to an amino acid sequence set forth in any one of SEQ ID NOs: 113-116, 121-122, 133-137, 148-149, 154, 162, and 193-201, or a pharmaceutically acceptable salt thereof.

[0033] In addition, the present disclosure describes a method of limiting the occurrence of, reducing the risk of, reducing the severity of, or treating a viral infection, in a subject in need thereof, said method comprising administering to the subject a composition comprising a therapeutically effective amount of a recombinant polypeptide consisting of an amino acid sequence that is at least 90% identical to an amino acid sequence according to set forth in any one of SEQ ID NOs: 113-116, 121-122, 133-137, 148-149, 154, 162, and 193-201, or a pharmaceutically acceptable salt thereof.

[0034] In addition, the present disclosure describes a method of limiting the occurrence of, reducing the risk of, reducing the severity of, or treating a viral infection, in a subject in need thereof, said method comprising administering to the subject a composition comprising a therapeutically effective amount of a recombinant polypeptide consisting of an amino acid sequence set forth in any one of SEQ ID NOs: 113-116, 121-122, 133-137, 148-149, 154, 162, and 193-201, or a pharmaceutically acceptable salt thereof.

[0035] In addition, the present disclosure describes a recombinant polypeptide comprising an amino acid sequence that is at least 90% identical to an amino acid sequence set forth in any one of SEQ ID NOs: 113-116, 121-122, 133-137, 148-149, 154, 162, and 193-201, or a pharmaceutically acceptable salt thereof, and further comprising an excipient.

[0036] In addition, the present disclosure describes a method of limiting the occurrence of, reducing the risk of, reducing the severity of, or treating a viral infection, in a subject in need thereof, said method comprising administering to the subject a composition comprising a therapeutically effective amount of a recombinant polypeptide of the present invention, wherein the virus is a virus belonging to the Family: Astroviridae; Bunyaviridae; Bornaviridae; Chuviridae; Flaviviridae; Filoviridae; Hantaviridae; Hepeviridae; Herpesviridae; Nairoviridae; Orthomyxoviridae; Papillomaviridae; Paramyxoviridae; Peribunyaviridae; Phenuiviridae; Pneumoviridae; Poxviridae; Retroviridae; Rhabdoviridae; or Togaviridae.

[0037] In addition, the present disclosure describes a method of limiting the occurrence of, reducing the risk of, reducing the severity of, or treating a viral infection, in a subject in need thereof, said method comprising administering to the subject a composition comprising a therapeutically effective amount of a recombinant polypeptide of the present invention, wherein the virus is selected from the group consisting of: Dengue; respiratory syncytial virus (RSV); Hantavirus; Epstein-Barr virus (EBV); EBV (uncleaved); HCoV-OC43; MERS-CoV; MERS-CoV (uncleaved); Herpes simplex virus (HSV) 1; HSV 1 (uncleaved); influenza A H5N1 virus (IAV H5N1); human papillomavirus (HPV); Human Metapneumovirus; and human immunodeficiency virus (HIV).

[0038] In addition, the present disclosure describes a method of limiting the occurrence of, reducing the risk of, reducing the severity of, or treating a viral infection, in a subject in need thereof, said method comprising administering to the subject a composition comprising a therapeutically effective amount of a recombinant polypeptide of the present invention, wherein the virus has a CendR motif selected from the group consisting of:

GTCTQSGERRREKR;
KNTNVTLSKKRKRR;
LTHKMIEESHRLRR;
VSFKPPPPPSRRRR;
VSFKPPPPPSRRRRGACVVY;
GSGYCVDYSKNRRSR;
LLEPVSISTGSRSAR;
LLEPVSISTGSRSARSAIEDLLFDK;
ERPRAPARSASRPRR;
ERPRAPARSASRPRRPV;
VLATGLRNVPQRKKR;
PTTSSTSTTAKRKKR;
IDMLKARVKNRVAR;
AKRRVVQREKR;
and
AKRRVVQREKRAVGIGALFLG.

[0039] In addition, the present disclosure describes a method of limiting the occurrence of, reducing the risk of, reducing the severity of, or treating a viral infection, in a subject in need thereof, said method comprising administering to the subject a composition comprising a therapeutically effective amount of a recombinant polypeptide, or a pharmaceutically acceptable salt thereof, comprising: (a) one or more mutant neuropilin (NRP) b1 domains (b1), NRP b2 domains (b2), or fragments thereof; and (b) an Fc domain; wherein the one or more b1, b2, or fragments thereof, are derived from an NRP1 or an NRP2 protein; wherein the recombinant polypeptide is operable to bind to virus having an —Z₁-X₁-X₂-Z₂- (CendR) motif, wherein Z₁ and Z₂ are arginine or lysine, and X₁ and X₂ are any amino acid, wherein Z is arginine or lysine, and X is any amino acid; and wherein the virus is selected from the group consisting of: Dengue; respiratory syncytial virus (RSV); Hantavirus; Epstein-Barr virus (EBV); EBV (uncleaved); HCoV-OC43; MERS-CoV; MERS-CoV (uncleaved); Herpes simplex virus (HSV) 1; HSV 1 (uncleaved); influenza A H5N1 virus (IAV H5N1); human papillomavirus (HPV); Human Metapneumovirus; and human immunodeficiency virus (HIV).

[0040] In addition, the present disclosure describes a method of limiting the occurrence of, reducing the risk of, reducing the severity of, or treating a viral infection, in a subject in need thereof, said method comprising administering to the subject a composition comprising a therapeutically effective amount of a recombinant polypeptide, or a pharmaceutically acceptable salt thereof, comprising: (a) one or more mutant neuropilin (NRP) b1 domains (b1), NRP b2 domains (b2), or fragments thereof; and (b) an Fc domain; wherein the one or more b1, b2, or fragments thereof, are derived from an NRP1 or an NRP2 protein; wherein the recombinant polypeptide is operable to bind to virus having an —Z₁-X₁-X₂-Z₂- (CendR) motif, wherein Z₁ and Z₂ are arginine or lysine, and X₁ and X₂ are any amino acid; and wherein the virus has a CendR motif selected from the group consisting of:

GTCTQSGERRREKR;
KNTNVTLSKKRKRR;
LTHKMIEESHRLRR;
VSFKPPPPPSRRRR;
VSFKPPPPPSRRRRGACVVY;
GSGYCVDYSKNRRSR;
LLEPVSISTGSRSAR;
LLEPVSISTGSRSARSAIEDLLFDK;
ERPRAPARSASRPRR;
ERPRAPARSASRPRRPV;
VLATGLRNVPQRKKR;
PTTSSTSTTAKRKKR;
IDMLKARVKNRVAR;
AKRRVVQREKR;
and
AKRRVVQREKRAVGIGALFLG.

[0041] In addition, the present disclosure describes a method of limiting the occurrence of, reducing the risk of, reducing the severity of, or treating a viral infection, in a subject in need thereof, said method comprising administering to the subject a composition comprising a therapeutically effective amount of a recombinant polypeptide of the present invention, or a pharmaceutically acceptable salt thereof, wherein the virus is not SARS-CoV-2.

[0042] In addition, the present disclosure describes a method of limiting the occurrence of, reducing the risk of, reducing the severity of, or treating a viral infection, in a subject in need thereof, said method comprising administering to the subject a composition comprising a therapeutically effective amount of a recombinant polypeptide of the present invention, or a pharmaceutically acceptable salt thereof, wherein the virus is not SARS-CoV-2 Wuhan; SARS-CoV-2 Wuhan (uncleaved); SARS-CoV-2 UK; SARS-CoV-2 India; or SARS-CoV-2 India (uncleaved).

[0043] In addition, the present disclosure describes a method of limiting the occurrence of, reducing the risk of, reducing the severity of, or treating a viral infection, in a subject in need thereof, said method comprising administering to the subject a composition comprising a therapeutically effective amount of a recombinant polypeptide of the present invention, or a pharmaceutically acceptable salt thereof, wherein the virus is a virus that does not belong to the Coronaviridae family.

[0044] In addition, the present disclosure describes a method of limiting the occurrence of, reducing the risk of, reducing the severity of, or treating a viral infection, in a subject in need thereof, said method comprising administering to the subject a composition comprising a therapeutically effective amount of a recombinant polypeptide of the present invention, or a pharmaceutically acceptable salt thereof, wherein the virus is a virus that does not belong to the Betacoronavirus genus.

[0045] In addition, the present disclosure describes a method of limiting the occurrence of, reducing the risk of, reducing the severity of, or treating a viral infection, in a subject in need thereof, said method comprising administering to the subject a composition comprising a therapeutically effective amount of a recombinant polypeptide of the present invention, or a pharmaceutically acceptable salt thereof, wherein the virus is a virus that does not belong to the Sarbecovirus subgenus.

### BRIEF DESCRIPTION OF FIGURES

[0046] The following figures are provided by way of example and are not intended to limit the scope of the invention.

[0047] FIG. 1A is schematic drawing of the ACE2 receptor and function in addition to the mechanism that a SARS-CoV-2 spike protein binds and allows for viral entry.

[0048] FIG. 1B is a schematic drawing of antibody neutralization of SARS-CoV-2 virus particles.

[0049] FIG. 1C is a comparative chart for the SARS-CoV-1 and SARS-CoV-2 entry sites and corresponding symptoms and infected tissues.

[0050] FIG. 2A is an illustration of the polypeptide used to neutralize the SARS-CoV-2 virus.

[0051] FIG. 2B is a schematic representation of the polypeptide having sNRPT (b1), sACE2 (ACE2), linker, and immunoglobulin (Fc) domains that can effectively bind one or more SARS-CoV-2 virus particles.

[0052] FIG. 2C represents the Furin cleavage site on the spike protein of the SARS-CoV-2 virus that correspondingly binds the b1 NRP1 binding region.

[0053] FIG. 3A is a schematic representation of the SARS-CoV-2's pinocytosis infection using the NRP1 and/or the ACE2 receptors.

[0054] FIG. 3B illustrates how an antibody construct can neutralize and opsonize the SARS-CoV-2 virus.

[0055] FIG. 3C is the proposed mechanism for current vaccine and/or therapeutic polypeptide therapies for SARS-CoV-2 treatment.

[0056] FIG. 3D is the proposed mechanism for the disclosed polypeptide therapeutics in SARS-CoV-2 treatment.

[0057] FIG. 4 provides a schematic representation of exemplary N1-Fc polypeptide constructs disclosed in the current invention.

[0058] FIG. 5 provides a schematic representation of exemplary N1-Fc-ACE2 polypeptide constructs disclosed in the current invention.

[0059] FIG. 6 is a plot of the Relative Fluorescence Units (RFU) of the wells corresponding to ACE2 peptide binding to the S1/S2 spike protein (A) and S protein CendR binding to hu-b1b2-His (B).

[0060] FIG. 7 is a plot of the HuN1abHuIgG binding to the SARS-CoV-2 spike protein as determined using Relative Fluorescence Units (RFU).

[0061] FIG. 8 depicts a graph showing average daily weight of hamsters inoculated with 51 plaque forming units (PFU) of SARS-CoV-2. The three groups include the no virus control; hamsters inoculated with 51 PFU; and hamsters inoculated with 51 PFU and treated with a 15 mg/kg intraperitoneal injection of Compound 1 (SEQ ID NO: 122). Error bars show the standard deviation (SD).

[0062] FIG. 9 depicts a graph showing average daily weight of hamsters inoculated with 510 plaque forming units PFU of SARS-CoV-2. The three groups include the no virus control; hamsters inoculated with 510 PFU; and hamsters inoculated with 510 PFU and treated with a 15 mg/kg intraperitoneal injection of Compound 1 (SEQ ID NO: 122). or SAD-S35. Error bars show the standard deviation (SD).

[0063] FIG. 10 depicts a is a graphical representation of the respiratory cycle, showing various measurements that are used for calculation of the respiratory parameters for comparison between the groups in this study. A single respiratory cycle is depicted, showing the various measurements that are used to calculate the (enhanced pause) Penh respiratory parameter. Here, PEF is peak expiratory flow of breath; PIF is peak inspiratory flow of breath; Te is time of expiratory portion of breath; and Tr is time required to exhale 65% of breath volume.

[0064] FIG. 11 depicts a single expiratory portion of the respiratory cycle, showing the time to peak expiratory flow relative to the total time of expiration, Te.

[0065] FIG. 12 depicts a single expiratory portion of the respiratory cycle, showing the time to expelling 50% of the total expiratory volume.

[0066] FIG. 13 depicts the Log Penh results of the plethysmography data from hamsters in the 51 PFU-treated group. Data are presented as averages+one standard error.

[0067] FIG. 14 depicts the Log Penh results of the plethysmography data from hamsters in the 510 PFU-treated group. Data are presented as averages+one standard error.

[0068] FIG. 15 depicts the natural logarithm (ln) Penh results of the plethysmography data from hamsters in the 51 PFU-treated group. Data are presented as averages+one standard error.

[0069] FIG. 16 depicts the In Penh results of the plethysmography data from hamsters in the 510 PFU-treated group. Data are presented as averages+one standard error.

[0070] FIG. 17 depicts the square root EF50 results of the plethysmography data from hamsters in the 51 PFU-treated group. Data are presented as averages+one standard error.

[0071] FIG. 18 depicts the square root EF50 results of the plethysmography data from hamsters in the 510 PFU-treated group. Data are presented as averages+one standard error.

[0072] FIG. 19 is a photomicrograph at 4× magnification of a paraffin histology slice stained with H&E that was obtained from a hamster belonging to the media inoculated control group. Inflammation is absent. Red size bar=150 μM.

[0073] FIG. 20 is a photomicrograph at 4× magnification of a paraffin histology slice stained with H&E that was obtained from a hamster in the 51 PFU-treated arm. Several areas of chronic-active inflammation consisting of macrophages, lymphocytes, plasma cells and neutrophils are present; see, e.g., insert (A) at 40× magnification. Red size bar=150 μM, 40× and green size bar is 50 μM.

[0074] FIG. 21 is a photomicrograph at 4× magnification of a paraffin histology slice stained with H&E that was obtained from a hamster belonging to the 510 PFU SARS-CoV-2 inoculated control group. Several areas of chronic-active inflammation consisting of macrophages, lymphocytes, plasma cells and neutrophils are present; see, e.g., insert (A) at 40× magnification. Red size bar=150 μM, 40× and green size bar is 50 μM.

[0075] FIG. 22 is a photomicrograph at 4× magnification of a paraffin histology slice stained with H&E that was obtained from a hamster treated with 51 PFU and SEQ ID NO: 122 (15 mg/kg) via intraperitoneal injection. Red size bar=150 μM, 40× and green size bar is 50 μM.

[0076] FIG. 23 is a photomicrograph at 4× magnification of a paraffin histology slice stained with H&E that was obtained from a hamster treated with 510 PFU and SEQ ID NO: 122 (15 mg/kg) via intraperitoneal injection. Red size bar=150 μM, 40× and green size bar is 50 μM.

[0077] FIG. 24 is a photomicrograph at 4× magnification of a paraffin histology slice stained with H&E that was obtained from a hamster treated with 510 PFU and SAD35 (15 mg/kg) via intraperitoneal injection. Red size bar=150 μM, 40× and green size bar is 50 μM.

[0078] FIG. 25 depicts a graph summarizing body weight in grams over time for hamsters treated with constructs and challenged with 1500 PFU of SARS CoV-2. Here, 1=SEQ ID NO: 122; 2=SEQ ID NO: 154; and 3=SEQ ID NO: 192. Error bars show the standard deviation (SD).

[0079] FIG. 26 depicts a graph showing viral titer detected as nucleocapsid gene copies/μL RNA extracted from throat swabs or BAL. Here, 1=SEQ ID NO: 122; 2=SEQ ID NO: 154; and 3=SEQ ID NO: 192. Error bars show the standard deviation (SD).

[0080] FIG. 27 depicts a graph showing SARS CoV-2 copy/μL of RNA extracted from olfactory bulb. Here, 1=SEQ ID NO: 122; 2=SEQ ID NO: 154; and 3=SEQ ID NO: 192. Error bars show the standard deviation (SD).

[0081] FIG. 28 depicts a graph showing EF50 (mL/sec) in groups over time. Here, 1=SEQ ID NO: 122; 2=SEQ ID NO: 154; and 3=SEQ ID NO: 192. Error bars show the standard deviation (SD).

[0082] FIG. 29 depicts a graph showing Penh in groups over time. Here, 1=SEQ ID NO: 122; 2=SEQ ID NO: 154; and 3=SEQ ID NO: 192. Error bars show the standard deviation (SD).

[0083] FIG. 30 depicts a graph showing Rpef in groups over time. Here, 1=SEQ ID NO: 122; 2=SEQ ID NO: 154; and 3=SEQ ID NO: 192. Error bars show the standard deviation (SD).

[0084] FIG. 31 depicts a graph showing Interferon-gamma (IFNγ) levels (pg/mL) in groups over time. Here, 1=SEQ ID NO: 122; 2=SEQ ID NO: 154; and 3=SEQ ID NO: 192. Error bars show the standard deviation (SD).

[0085] FIG. 32 depicts a graph showing the results of the cytokine analysis for angiotensin 1-7 (Ang 1-7) levels during SARS CoV-2 infection in hamsters over time. Here, 1=SEQ ID NO: 122; 2=SEQ ID NO: 154; and 3=SEQ ID NO: 192. Error bars show the standard deviation (SD).

[0086] FIG. 33 depicts a graph showing the results of the cytokine analysis for Angiotensin II levels during SARS CoV-2 infection in hamsters over time. Here, 1=SEQ ID NO: 122; 2=SEQ ID NO: 154; and 3=SEQ ID NO: 192. Error bars show the standard deviation (SD).

[0087] FIG. 34 depicts a graph showing ratio of Angiotensin II to Ang 1-7 during SARS CoV-2 infection in hamsters over time. Here, 1=SEQ ID NO: 122; 2=SEQ ID NO: 154; and 3=SEQ ID NO: 192. Error bars show the standard deviation (SD).

[0088] FIG. 35 shows photomicrographs of formalin fixed H&E stained hamster lungs at 4× magnification. Evidence of bronchopneumonia is shown on day 7 at experiment end. Panel A=media control; Panel B=Virus control; Panel C=SEQ ID NO: 122; Panel D=SEQ ID NO: 154; and Panel E=SEQ ID NO: 192. Note the areas of intense blue inflammation, which comprises macrophages, neutrophils and lymphocytes. Size bar=1 mm.

[0089] FIG. 36 depicts a histogram showing the scoring of inflammation in the histology sections provided in FIG. 35 were scored using the following scheme: (a) Lesion distribution: none=0, focal=1, multifocal=2, diffuse=3; (b) Inflammation intensity: none=0, mild (2-3 inflammatory cells thick)=1, moderate (inflammatory cells=3-20 cells thick), severe (inflammatory cells>20 cells thick); (c) Small vessel thrombosis: absent=0, present=1. There were not significant differences between the treatment groups and control (Wilcoxon Rank Sum test).

[0090] FIG. 37 depicts the body weight of all K18ACE2 mice taken daily during the progression of B1.351. strain SARS CoV-2 infection. Body weights of K18-ACE2 mice challenged with SARS-CoV-2 B1.351 in the following four arms: Arm (1): Virus inoculation with SEQ ID NO: 113 (15 mg/kg) administration group n=13 each; Arm (2): Virus inoculation with 1.2 mg/kg of an antibody that binds a SARS-CoV-2 spike protein, said antibody having a heavy chain comprising the amino acid sequence set forth in SEQ ID NO: 189 and a light chain comprising the amino acid sequence set forth in SEQ ID NO: 190 (anti-SARS-CoV-2 spike protein antibody), administration group n=13 each; Arm (3): Cell culture medium intranasal control with IP saline administration n=6; Arm (4): Virus inoculated with IP saline administration n=6. Viral inoculated mice in arms 1 and 4 began to show signs clinical signs of illness by day 4, a few succumbed to the viral infection, and the remainder were all ill by day 7 at study termination. Here, 1=SEQ ID NO: 113; 2=anti-SARS-CoV-2 spike protein antibody.

[0091] FIG. 38 shows the clinical scores of all K18ACE2 mice taken daily during the progression of B1.351. strain SARS CoV-2 infection. Here, 1=SEQ ID NO: 113; 2=anti-SARS-CoV-2 spike protein antibody.

[0092] FIG. 39 depicts a graph showing serum fibrin degradation products of all K18ACE2 mice taken daily during the progression of B1.351. strain SARS CoV-2 infection. Here, 1=SEQ ID NO: 113; 2=anti-SARS-CoV-2 spike protein antibody.

[0093] FIG. 40 depicts a graph showing D-dimer levels in K18ACE2 mice taken at the end of the study after B1.351. strain SARS CoV-2 infection. Although there appears to be a lowering of the average D-dimer serum level in the SEQ ID NO: 113 and anti-SARS-CoV-2 spike protein antibody, treated groups, the averages did not differ statistically from the placebo and viral controls (one-way ANOVA using Tukey's multiple comparisons). Here, 1=SEQ ID NO: 113; 2=anti-SARS-CoV-2 spike protein antibody (a heavy chain comprising the amino acid sequence set forth in SEQ ID NO: 189 and a light chain comprising the amino acid sequence set forth in SEQ ID NO: 190).

[0094] FIG. 41 shows the Heparin binding affinity profiles for construct molecules of the present invention. (A) is SEQ ID NO: 113; (B) is SEQ ID NO: 121; (C) is SEQ ID NO: 122; (N) is SEQ ID NO: 191; (O) is SEQ ID NO: 121; (G) is SEQ ID NO: 128; (L) is SEQ ID NO: 129; (M) is SEQ ID NO: 154; (D) is SEQ ID NO: 135; (E) is SEQ ID NO: 136; (F) is SEQ ID NO: 137; (H) is SEQ ID NO: 114; (I) is SEQ ID NO: 115; (J) is SEQ ID NO: 116; (K) is SEQ ID NO: 133.

[0095] FIG. 42 shows a representation of the constructs of the present invention. The top grey portion represents the neuropilin-b1 domain linked by a short peptide sequence known as a G4S linker to additional (double tandem shown) b1 domains and the IgG Fc stem in black consisting of the constant heavy chains (CH2 and CH3).

[0096] FIG. 43 shows the cumulative distribution of PiTou scores in human peptides.

[0097] FIG. 44 shows the cumulative distribution of PiTou scores in viral peptides.

[0098] FIG. 45 shows the cumulative distribution of PiTou scores in bacterial peptides.

[0099] FIG. 46 shows the PiTou scores at known viral cleavage sites.

[0100] FIG. 47 shows a prioritized PiTou score distribution.

### DETAILED DESCRIPTION

### Definitions

[0101] Unless defined otherwise, all technical and scientific terms used herein have the same meaning as commonly understood by one of ordinary skill in the art to which this disclosure belongs. Accordingly, the following terms are intended to have the following meanings:

[0102] As used in the specification and claims, the singular form “a”, “an” and “the” includes plural references unless the context clearly dictates otherwise.

[0103] As used herein, “administration” of a disclosed polypeptide encompasses the delivery to a subject of a polypeptide or composition of the present invention, as described herein, or a prodrug or other pharmaceutically acceptable derivative thereof, using any suitable formulation or route of administration, e.g., as described herein.

[0104] As used herein, the term “and/or,” when used in a list of two or more items, means that any one of the listed items can be employed by itself, or any combination of two or more of the listed items can be employed. For example, if a composition is described as comprising components A, B, and/or C, the composition can contain A alone; B alone; C alone; A and B in combination; A and C in combination; B and C in combination; or A, B, and C in combination.

[0105] As used herein, “treatment” and “treating”, are used interchangeably herein, and refer to an approach for obtaining beneficial or desired results including, but not limited to, therapeutic benefit. By therapeutic benefit is meant eradication or amelioration of the underlying disorder being treated. Also, a therapeutic benefit is achieved with the eradication or amelioration of one or more of the physiological symptoms associated with the underlying disorder such that an improvement is observed in the patient, notwithstanding that the patient can still be afflicted with the underlying disorder. The term “treat”, in all its verb forms, is used herein to mean to relieve, alleviate, prevent, and/or manage at least one symptom of a disorder in a subject.

[0106] A “subject,” as used herein, can refer to any animal which is subject to a viral infection, e.g., a mammal, such as an experimental animal, a farm animal, pet, or the like. In some embodiments, the animal is a primate, preferably a human. As used herein, the terms “subject” and “patient” are used interchangeably. The terms “subject” and “patient” refer to an animal (e.g., a bird such as a chicken, quail or turkey, or a mammal), specifically a “mammal” including a non-primate (e.g., a cow, pig, horse, sheep, rabbit, guinea pig, rat, cat, dog, and mouse) and a primate (e.g., a monkey, chimpanzee and a human), and more specifically a human. In one embodiment, the subject is a non-human animal such as a farm animal (e.g., a horse, cow, pig or sheep), or a pet (e.g., a dog, cat, guinea pig or rabbit). In a preferred embodiment, the subject is a “human”.

[0107] As used herein, the term “fusion” refers to unifying two molecules having the same or different function or structure, and the methods of fusing may include any physical, chemical or biological method capable of binding the peptide to the protein, the small-molecule drug, the nanoparticle or the liposome. Preferably, the fusion may be mediated by a linker peptide, and for example, the linker peptide may be fused to the C-terminus of a fragment of an antibody light-chain variable region (Fc).

[0108] The terms, “disease”, “disorder”, and “condition” may be used interchangeably here to refer to a virus mediated medical or pathological condition.

[0109] The term “biological sample”, as used herein, includes, without limitation, cell cultures or extracts thereof, biopsied material obtained from a mammal or extracts thereof, blood, saliva, urine, feces, semen, tears, or other body fluids or extracts thereof.

[0110] As used herein, “multiplicity of infection” or “MOI” is the ratio of infectious agents (e.g. phage or virus) to infection targets (e.g. cell). For example, when referring to a group of cells inoculated with infectious virus particles, the multiplicity of infection or MOI is the ratio defined by the number of infectious virus particles deposited in a well divided by the number of target cells present in that well.

[0111] As used herein the term “inhibition of the replication of SARS-CoV-2 virus” includes both the reduction in the amount of virus replication (e.g. the reduction by at least 10%) and the complete arrest of virus replication (i.e., 100% reduction in the amount of virus replication). In some embodiments, the replication of SARS-CoV-2 is inhibited by at least 50%, at least 65%, at least 75%, at least 85%, at least 90%, or at least 95%.

[0112] As used herein a “viral titer (or titre)” is a measure of virus concentration. Titer testing can employ serial dilution to obtain approximate quantitative information from an analytical procedure that inherently only evaluates as positive or negative. The titer corresponds to the highest dilution factor that still yields a positive reading; for example, positive readings in the first 8 serial twofold dilutions translate into a titer of 1:256. A specific example is viral titer. To determine the titer, several dilutions can be prepared, such as 10⁻¹, 10⁻², 10⁻³, . . . , 10⁻⁸. The lowest concentration of virus that still infects cells is the viral titer.

[0113] As used herein, the terms “treat” and “treatment” and “treating” and the like are used herein to generally refer to obtaining a desired pharmacologic and/or physiologic effect. The effect can be prophylactic in terms of completely or partially preventing a disease or symptom thereof and/or may be therapeutic in terms of a partial or complete stabilization or cure for a disease and/or adverse effect attributable to the disease. “Treatment” as used herein covers any treatment of a disease in a subject, particularly a human, and includes: (a) preventing the disease or symptom from occurring in a subject which may be predisposed to the disease or symptom but has not yet been diagnosed as having it; (b) inhibiting the disease symptom, i.e., arresting its development; or (c) relieving the disease symptom, i.e., causing regression of the disease or symptom. Those in need of treatment include individuals already diagnosed with a disease, e.g., a viral infection, as well as those in which the disease is to be prevented. Thus, the terms “treat” or “treatment” or “treating” refer to both therapeutic and prophylactic treatments. For example, therapeutic treatments includes the reduction or amelioration of the progression, severity and/or duration of a disease's (e.g., a virus's) mediated conditions, or the amelioration of one or more symptoms (specifically, one or more discernible symptoms) of the disease's mediated conditions, resulting from the administration of one or more therapies (e.g., one or more therapeutic agents such as a polypeptide or composition of the invention).

[0114] In specific embodiments, the therapeutic treatment includes the amelioration of at least one measurable physical parameter of a virus mediated condition. In other embodiments the therapeutic treatment includes the inhibition of the progression of the virus's mediated condition, either physically by, e.g., stabilization of a discernible symptom, physiologically by, e.g., stabilization of a physical parameter, or both. In other embodiments the therapeutic treatment includes the reduction or stabilization of the virus's mediated infections. Antiviral drugs can be used in the community setting to treat people who already have COVID-19 to reduce the severity of symptoms and reduce the number of days that they are sick.

[0115] The terms “prophylaxis” or “prophylactic use” and “prophylactic treatment” as used herein, refer to any medical or public health procedure whose purpose is to prevent, rather than treat or cure a disease. As used herein, the terms “prevent”, “prevention” and “preventing” refer to the reduction in the risk of acquiring or developing a given condition, or the reduction or inhibition of the recurrence or said condition in a subject who is not ill, but who has been or may be near a person with the disease. The term “chemoprophylaxis” refers to the use of medications, e.g. small molecule drugs (rather than “vaccines”) for the prevention of a disorder or disease.

[0116] As used herein, prophylactic use includes the use in situations in which an outbreak has been detected, to prevent contagion or spread of the infection in places where a lot of people that are at high risk of serious viral (e.g., COVID-19) complications live in close contact with each other (e.g. in a hospital ward, day-care center, prison, nursing home, etc.). It also includes the use among populations who require protection from the SARS-CoV-2 but who either do not get protection after vaccination (e.g. due to weak immune system), or when the vaccine is unavailable to them, or when they cannot get the vaccine because of side effects. It also includes use during the two weeks following vaccination, since during that time the vaccine is still ineffective. Prophylactic use may also include treating a person who is not ill with the SARS-CoV-2 or not considered at high risk for complications, in order to reduce the chances of getting infected with the SARS-CoV-2 and passing it on to a high-risk person in close contact with him (for instance, healthcare workers, nursing home workers, etc.).

[0117] As used herein, an “effective amount” refers to an amount sufficient to elicit the desired biological response. In the present invention the desired biological response is to inhibit the replication of the virus (e.g., SARS-CoV-2), to reduce the amount of viruses or to reduce or ameliorate the severity, duration, progression, or onset of a viral infection, prevent the advancement of a viral infection, prevent the recurrence, development, onset or progression of a symptom associated with the viral infection, or enhance or improve the prophylactic or therapeutic effect(s) of another therapy used against viral infections. The precise amount of compound administered to a subject will depend on the mode of administration, the type and severity of the infection and on the characteristics of the subject, such as general health, age, sex, body weight and tolerance to drugs. The skilled artisan will be able to determine appropriate dosages depending on these and other factors. When co-administered with other anti-viral agents, e.g., when co-administered with an anti-viral medication, an “effective amount” of the second agent will depend on the type of drug used. Suitable dosages are known for approved agents and can be adjusted by the skilled artisan according to the condition of the subject, the type of condition(s) being treated and the amount of a polypeptide described herein being used. In cases where no amount is expressly noted, an effective amount should be assumed. For example, compounds described herein can be administered to a subject in a dosage range from between approximately 0.01 to 100 mg/kg body weight/day for therapeutic or prophylactic treatment.

[0118] The terms “polypeptide,” “peptide” and “protein” are used interchangeably herein to refer to a polymer of amino acid residues.

[0119] The term “reduce” or other forms of the word, such as “reducing” or “reduction,” generally refers to the lowering of an event or characteristic (e.g., one or more symptoms, or the binding of one protein to another). It is understood that this is typically in relation to some standard or expected value, in other words it is relative, but that it is not always necessary for the standard or relative value to be referred to. In some embodiments, the term “reducing,” as used in the context of “reducing the risk” or “reducing the severity” means decreasing risk of being infected with a given disease or virus; or decreasing the severity and/or frequency of the symptom(s) and/or elimination of the symptom(s) of a given disease or virus, relative to a subject that has not been treated pursuant to the compositions and/or methods of the present invention. Here

[0120] The term “reduced,” as used in the context of “reduced binding” refers to a decrease in the affinity of one molecule to another molecule. For example, in some embodiments, a protein, domain, or motif can specifically bind to a particular target, e.g., a peptide, polypeptide, protein, carbohydrate, saccharide, polysaccharide, glycosaminoglycan, or any epitope thereof, with a given affinity; and, a reduction said binding refers to a decrease in the affinity of said protein, domain, or motif to the target. Measuring the affinity of binding is well known in the art. In some embodiments, the affinity of one molecule for another molecule to which it specifically binds is characterized by a dissociation constant (K_{D} or K_{d})

[0121] “Affinity” refers to the strength of the sum total of non-covalent interactions between a single binding site of a molecule and its binding target or partner (e.g., an antigen). The affinity of a molecule for its target can generally be represented by the dissociation constant (K_{D}), which is the ratio of dissociation and association rate constants (k_{off} and kₒₙ, respectively). Briefly, the strength, or affinity of binding interactions can be expressed in terms of the dissociation constant (K_{D}) of the interaction, wherein a smaller K_{D} represents a greater affinity. The binding properties of selected polypeptides can be quantified using methods well known in the art. One such method entails measuring the rates of antigen-binding site/antigen complex formation and dissociation, wherein those rates depend on the concentrations of the complex partners, the affinity of the interaction, and geometric parameters that equally influence the rate in both directions. Thus, both the “on rate constant” (Kₒₙ) and the “off rate constant” (K_{off}) can be determined by calculation of the concentrations and the actual rates of association and dissociation. (See Nature 361:186-87 (1993)). The ratio of K_{off}/Kₒₙ enables the cancellation of all parameters not related to affinity, and is equal to the dissociation constant K_{D}. (See, generally, Davies et al. (1990) Annual Rev Biochem 59:439-473).

[0122] Thus, equivalent affinities may comprise different rate constants, as long as the ratio of the rate constants remains the same. Affinity can be measured by well-established methods known in the art, including those described herein. Thus, in some embodiments, “reduced binding” refers to a decrease in affinity for the respective interaction. Conversely, “increased binding” refers to an increase in binding affinity for the respective interaction.

[0123] In some embodiments, a recombinant polypeptide of the present invention can specifically bind to an epitope when the equilibrium binding constant (K_{D}) is ≤1 μM. In some embodiments, a recombinant polypeptide of the present invention can specifically bind to an epitope when the equilibrium binding constant (K_{D}) is 100 nM. In some embodiments, a recombinant polypeptide of the present invention can specifically bind to an epitope when the equilibrium binding constant (K_{D}) is 10 nM. In some embodiments, a recombinant polypeptide of the present invention can specifically bind to an epitope when the equilibrium binding constant (K_{D}) is 100 μM to about 1 μM, as measured by assays such as Surface Plasmon Resonance (SPR), Octet assays, or similar assays known to those skilled in the art. In some embodiments, a K_{D} can be 10⁻⁵ M or less (e.g., 10⁻⁶ M or less, 10⁻⁷ M or less, 10⁻⁸ M or less, 10⁻⁸ M or less, 10⁻¹⁰ M or less, 10⁻¹¹ M or less, 10⁻¹² M or less, 10⁻¹³ M or less, 10⁻¹⁴ M or less, 10⁻¹⁵ M or less, or 10⁻¹⁶ M or less).

[0124] In some embodiments, there can be a reduction of binding of 1%, 2%, 3%, 4%, 5%, 6%, 7%, 8%, 9%, 10%, 20%, 30%, 40%, 50%, 60%, 70%, 80%, 90% or 100% in a recombinant polypeptide compared to a control. For example, in recombinant polypeptides having reduced heparin or heparan sulfate binding, there can be there can be a reduction of binding of 1%, 2%, 3%, 4%, 5%, 6%, 7%, 8%, 9%, 10%, 20%, 30%, 40%, 50%, 60%, 70%, 80%, 90% or 100% in a recombinant polypeptide compared to a control.

[0125] “Derived” or “derived from” refers to obtaining a peptide, polypeptide, protein or polynucleotide from a known and/or originating peptide, polypeptide, protein or polynucleotide. Thus, as used herein, the term “derived from” encompasses, without limitation: a protein or polynucleotide that is isolated or obtained directly from an originating source (e.g. an organism); a synthetic or recombinantly generated protein or polynucleotide that is identical, substantially related to, or modified from, a protein or polynucleotide from an known/originating source (e.g., an NRP1 or NRP2); or protein or polynucleotide that is made from a protein or polynucleotide of an known/originating source or a fragment thereof. The term “substantially related”, as used herein, means that the protein may have been modified by chemical, physical or other means (e.g. sequence modification).

[0126] Accordingly, “derived” can refer to either directly or indirectly obtaining a protein or polynucleotide from a known and/or originating protein or polynucleotide. For example, in some embodiments, “derived” can refer to obtaining a protein or polynucleotide from a known and/or originating protein or polynucleotide by looking at the sequence of a known/originating protein or polynucleotide and preparing a protein or polynucleotide having a sequence similar, at least in part, to the sequence of the known and/or originating protein or polynucleotide. In yet other embodiments, “derived” can refer to obtaining a protein or polynucleotide from a known and/or originating protein or polynucleotide by isolating a protein or polynucleotide from an organism that is related to a known protein or polynucleotide. Other methods of “deriving” a protein or polynucleotide from a known protein or polynucleotide are known to one of skill in the art.

[0127] In some embodiments, “derived” in the context of a protein (e.g., “a protein derived from an organism”) describes a condition wherein said protein was originally identified in an organism, and has been reproduced therefrom via isolation from the organism, or through synthetic or recombinant means.

[0128] “Excipient” refers to any pharmacologically inactive, natural, or synthetic, component or substance that is formulated alongside (e.g., concomitantly), or subsequent to, the active ingredient of the present invention. In some embodiments, an excipient can be any additive, adjuvant, binder, bulking agent, carrier, coating, diluent, disintegrant, filler, glidant, lubricant, preservative, vehicle, or combination thereof, with which a recombinant polypeptide of the present invention can be administered, and or which is useful in preparing a composition of the present invention. Excipients, include any such materials known in the art that are nontoxic and do not interact with other components of a composition. In some embodiments, excipients can be formulated alongside a recombinant polypeptide when preparing a composition for the purpose of bulking up compositions (thus often referred to as bulking agents, fillers or diluents). In other embodiments, an excipient can be used to confer an enhancement on the active ingredient in the final dosage form, such as facilitating absorption and/or solubility. In yet other embodiments, an excipient can be used to provide stability, or prevent contamination (e.g., microbial contamination). In other embodiments, an excipient can be used to confer a physical property to a composition (e.g., a composition that is a dry granular, or dry flowable powder physical form). Reference to an excipient includes both one and more than one such excipients. Suitable pharmaceutical excipients are described in Remington's Pharmaceutical Sciences, by E. W. Martin, the disclosure of which is incorporated herein by reference in its entirety.

[0129] “Homologous” refers to the sequence similarity or sequence identity between two polypeptides or between two nucleic acid molecules. When a position in both of the two compared sequences is occupied by the same base or amino acid monomer subunit, e.g., if a position in each of two DNA molecules is occupied by adenine, then the molecules are homologous at that position. The percent of homology between two sequences is a function of the number of matching or homologous positions shared by the two sequences divided by the number of positions compared ×100. Thus, in some embodiments, the term “homologous” refers to the sequence similarity between two polypeptide molecules, or between two nucleic acid molecules. When a position in both of the two compared sequences is occupied by the same base or amino acid monomeric subunit, e.g., if a position in each of two DNA molecules is occupied by adenine, then the molecules are homologous at that position. The homology between two sequences is a function of the number of matching or homologous positions shared by the two sequences. For example, if 6 of 10 of the positions in two sequences are matched or homologous then the two sequences are 60% homologous. By way of example, the DNA sequences ATTGCC and TATGGC share 50% homology.

[0130] The term “homology,” when used in relation to nucleic acids, refers to a degree of complementarity. There may be partial homology, or complete homology and thus identical. “Sequence identity” refers to a measure of relatedness between two or more nucleic acids, and is given as a percentage with reference to the total comparison length. The identity calculation takes into account those nucleotide residues that are identical and in the same relative positions in their respective larger sequences.

[0131] “Identity” refers to a relationship between two or more polypeptide sequences or two or more polynucleotide sequences, as determined by comparing said sequences. The term “identity” also means the degree of sequence relatedness between polypeptide or polynucleotide sequences, as the case may be, as determined by the match between strings of such sequences. “Identity” and “similarity” can be readily calculated by any one of the myriad methods known to those having ordinary skill in the art, including but not limited to those described in: Computational Molecular Biology, Lesk, A. M., ed., Oxford University Press, New York, 1988; Biocomputing: Informatics and Genome Projects, Smith, D. W., ed., Academic Press, New York, 1993; Computer Analysis of Sequence Data, Part 1, Griffin, A. M., and Griffin, H. G., eds., Humana Press, New Jersey, 1994; Sequence Analysis in Molecular Biology, von Heinje, G., Academic Press, 1987; and Sequence Analysis Primer, Gribskov, M. and Devereux, J., eds., M Stockton Press, New York, 1991; and Carillo, H., and Lipman, D., SIAM J. Applied Math., 48: 1073 (1988), the disclosures of which are incorporated herein by reference in their entireties. Furthermore, methods to determine identity and similarity are codified in publicly available computer programs. For example in some embodiments, methods to determine identity and similarity between two sequences include, but are not limited to, the GCG program package (Devereux, J., et al., Nucleic Acids Research 12(1): 387 (1984)), BLASTP, BLASTN, and FASTA (Altschul, S. F. et al., J. Molec. Biol. 215: 403-410 (1990). The BLAST X program is publicly available from NCBI and other sources (BLAST Manual, Altschul, S., et al., NCBI NLM NIH Bethesda, Md. 20894; Altschul, S., et al., J. Mol. Biol. 215: 403-410 (1990), the disclosures of which are incorporated herein by reference in their entireties.

[0132] “Mutant” refers to an organism, DNA sequence, polynucleotide, amino acid sequence, peptide, polypeptide, or protein, that has an alteration, variation, or modification (for example, in the nucleotide sequence or the amino acid sequence), which causes said organism and/or sequence to be different from the naturally occurring or wild-type organism, wild-type sequence, and/or reference sequence with which the mutant is being compared. In some embodiments, this alteration, variation, or modification can be one or more nucleotide and/or amino acid substitutions or modifications (e.g., deletion or addition). In some embodiments, the one or more amino acid substitutions or modifications can be conservative; here, such a conservative amino acid substitution and/or modification in a “mutant” does not substantially diminish the activity of the mutant in relation to its non-mutant form. For example, in some embodiments, a “mutant” possesses one or more conservative amino acid substitutions when compared to a peptide with a disclosed and/or claimed sequence, as indicated by a SEQ ID NO.

[0133] “Operable” refers to the ability to be used, the ability to do something, and/or the ability to accomplish some function or result. For example, in some embodiments, “operable” refers to the ability of a polynucleotide, DNA sequence, RNA sequence, or other nucleotide sequence or gene to encode a peptide, polypeptide, and/or protein. For example, in some embodiments, a polynucleotide may be operable to encode a protein, which means that the polynucleotide contains information that imbues it with the ability to create a protein (e.g., by transcribing mRNA, which is in turn translated to protein).

[0134] “Wild type” or “WT” refers to the phenotype and/or genotype (i.e., the appearance or sequence) of an organism, polynucleotide sequence, and/or polypeptide sequence, as it is found and/or observed in its naturally occurring state or condition.

[0135] Throughout this specification, unless the context requires otherwise, the word “comprise,” or variations such as “comprises” or “comprising,” will be understood to imply the inclusion of a stated step or element or integer or group of steps or elements or integers but not the exclusion of any other step or element or integer or group of elements or integers.

[0136] All patent applications, patents, and printed publications referred to herein are incorporated by reference in their entirety to the same extent as if each individual publication, patent, or patent application was specifically and individually indicated to be incorporated by reference in its entirety. And, all patent applications, patents, and printed publications cited herein are incorporated herein by reference in the entireties, except for any definitions, subject matter disclaimers, or disavowals, and except to the extent that the incorporated material is inconsistent with the express disclosure herein, in which case the language in this disclosure controls.

[0137] SARS-CoV-2 Virion Particle Model Background and Mechanism

[0138] Severe acute respiratory syndrome coronavirus 2 (SARS-CoV-2) incites an immune response in the body leading to increased vascular permeability, increased endothelial inflammatory response, reduced levels of nitric oxide (NO) and impaired angiogenesis. The endothelial dysfunction cause by the cytokine storm from SARS-CoV-2 can lead to multiorgan failure, including the heart and kidney. Comorbidity factors such as age, hypertension, and/or obesity can exacerbate the effects of SARS-CoV-2. In many severe cases of SARS-CoV-2, the severe acute respiratory syndrome occurs in the alveolus and endothelium in the lungs where the COVID-19 includes vascular leakage, clotting, and inflammation. SARS-CoV-2 is a respiratory virus that has the ability to infect blood vessel cells and circulate through the body unlike the original SARS virus, H1N1, or other types of viruses such as Ebola or Dengue that can damage endothelial cells but do not infect the lungs.

[0139] As illustrated in FIG. 1A, a SARS-CoV-2 virus can enter and infect a human cell by attaching its spike protein (SARS-S) to an angiotensin converting enzyme 2 (ACE2) cellular receptor that resides on the surface of the cell. Once the spike protein is bound to the ACE2 receptor, the SARS-CoV-2 virus can enter into the cell where the virus shell is broken apart, releasing RNA into the host cell where it replicates and generates more viral particles. The ability of the ACE2 receptor to break down angiotensin II, control blood pressure, and block organ damage can be severely deterred during the SARS-CoV-2 infection.

[0140] Referring now to FIG. 1B, one of the known mechanisms that can be used to help neutralize the spread of SARS-CoV-2 infection is antibody neutralization. As illustrated in FIG. 1B, the antibody or an immunoglobulin construct can bind to the SARS-CoV-2 particle to block its attachment to the ACE2 cellular receptors of the cell by imparting steric interference, capsid stabilization, and or structural changes. In some cases, the antibody, polypeptide, or immunoglobulin construct can aggregate to more than one SARS-CoV-2 particle to further prevent the internalization of the virus into the cell. In these cases where the SARS-CoV-2 particle is coupled to one or more antibodies, the corresponding large particle may enter the cell through phagocytosis where the conjugated SARS-CoV-2 particle is neutralized.

[0141] Based on the pathology of the coronavirus where blood clots can be found in almost every organ during autopsies on COVID-19 patients, scientists are beginning to consider the coronavirus as a blood vessel disease. If COVID-19 is in fact a vascular disease, it is believed that the best antiviral therapy might not actually be a traditional antiviral therapy. As explained above, it is understood that both SARS-CoV-1 and SARS-CoV-2 enter the cell through the ACE2 cellular receptor. Based on the additional symptoms and increase in infected tissues in patients infected with SARS-CoV-2, it is believed that one or more additional entry sites may explain the prevalence of microthrombosis and amount of angiogenesis in the lung as compared Influenzas A and SARS-CoV-1. Referring to FIG. 1C, a flowchart is provided that outlines the use of neuropilin-1 (NRP-1) as a means for the SARS-CoV-2 to enter the cell in addition to the ACE2 receptor could explain the additional symptoms observed such as vascular disorders, blood clots, angiogenesis, AKI and diabetes and additionally infected tissues such as the heart, kidney, and endothelial layer of the blood vessels where the loss of taste/smell is also frequently observed.

[0142] Recent research has identified that neuropilin-1 facilitates SARS-CoV-2 cell entry and provides a possible pathway into the central nervous system. It has additionally been noted that neuropilin-1 is a host factor for SARS-CoV-2 infection. Referring now to FIG. 2A, the soluble domains of the SARS-CoV-2 virus are shown to utilize the binding ability of the b1b2 domain of a neuropilin-1 receptor and the soluble ACE2 receptor. By designing the Fc domain of the immunoglobulin to provide a double decoy soluble protein, this corresponding fusion polypeptide can effectively bind at least 1, at least 2, at least 3, at least 4, at least 5, or at least 6 different spike proteins of one or more SARS-CoV-2 virus particles. As illustrated in FIG. 2B and explained in more detail herein, an exemplary fusion polypeptide can include sNRP1 (b1), sACE2 (ACE2), linker, and immunoglobulin (Fc) domains that can effectively bind at least 1, at least 2, at least 3, at least 4, at least 5, or at least 6 different spike proteins of one or more SARS-CoV-2 virus particles.

[0143] Referring now to FIG. 2C, SARS-CoV-2 has a four (4) amino acid insertion (PRRA) between Ser680 and ARG685 that generates a Furin cleavage site. The Furin cleavage of SARS-CoV-2 exposes a C-terminal motif RXXR-OH (C-end R rule) that is known to bind to the neuropilin-1 (NRP1) and/or neuropilin-2 (NRP2) b1 binding sites.

[0144] Accordingly, in designing a therapeutic that would be effective at reducing and treating viral infections such as the SARS-CoV-2 virus, fusion peptides comprising a combination of a neuropilin-1 (NRP1) domain, a neuropilin-2 (NRP2) domain, an angiotensin converting enzyme 2 (ACE2) domain, or a combination thereof are designed herein to specifically bind a coat protein of a virus particle, in particular, a S protein of COVID-19 particles. In some embodiments, these fusion peptides further comprise an immunoglobulin domain, for example, and Fc domain derived from a human immunoglobulin.

[0145] Referring to FIG. 3A, a SARS-CoV-2 virus's pinocytosis infection is illustrated using a NRP1 receptor and or an ACE2 receptor. In each case, the SARS-CoV-2 virus is introduced into the cell by the budding of a small vesicle from the cell membrane where the virus shell can be broken apart in an acidic environment, releasing RNA into the host cell where it replicates and generates more viral particles.

[0146] Referring now to FIG. 3B, an illustrated schematic is provided that demonstrates how the disclosed polypeptides can neutralize and opsonize a SAR-CoV-2 virus particle. In step 1, the polypeptides (A) and pathogens (B) freely circulate and roam in the blood. In step 2, the disclosed polypeptides can bind to the pathogens, and can do so in different formations such as: opsonization (2a), neutralization (2b), and agglutination (2c). In step 3 a phagocyte (C) approaches the pathogen where the b1 and/or ACE2 domains, optionally coupled to the Fc region (D) of the disclosed polypeptides binds to one of the receptors (E) on the phagocyte. Lastly, in step 4, phagocytosis occurs as the pathogen is ingested.

[0147] The currently proposed mechanism for reducing and treating a SAR-CoV-2 viral infection is illustrated in FIG. 3C. In this mechanism, therapeutic antibodies and/or a vaccine would be provided that would produce antibodies that could bind to the SAR-CoV-2 virus and trigger phagocytosis. The problem with this approach is the SAR-CoV-2 virus particles that could alternatively bind to the NRP1 receptor and infect the cell through CendR-NRP1 mediated pinocytosis. The SAR-CoV-2 virus that may remain active in the body through the CendR-NRP1 mediated pinocytosis mechanism could lead to incomplete treatment and/or difficulty in effectively treating the patient.

[0148] Alternatively, as illustrated in FIG. 3D, the proposed treatment using the polypeptides as disclosed herein could remedy the deficiencies of the mechanism outlined in FIG. 3C. For example, a polypeptide comprising both a b1 domain, or a derivative or fragment thereof, of a neuropilin; and an ACE2 domain, or a derivative or fragment thereof, of angiotensin converting enzyme 2 would target both the CendR-NRP1 and ACE2 mediated pinocytosis mechanisms in which the SAR-CoV-2 virus enters the cell. By eliminating the mechanisms that the SAR-CoV-2 virus uses to enter the cell and effectively neutralizing the virus's effects through phagocytosis, a complete and effective treatment can be provided to the patient.

[0149] Neuropilin Neutralization of SARS-CoV-2

[0150] Neuropilin broadly consists of five domains, and from the N-terminus, a1 and a2 domains are classified as CUB domains, and an Ig-like C2 type of semaphorin binds thereto. Particularly, this site forms a complex with plexin, and plays a role of increasing the binding force with semaphorin-plexin. The b1 and b2 domains are classified as FV/VIII domains, and the C-terminus of VEGF family ligand or class 3 semaphorin ligand binds thereto. Particularly, in this portion, a site to which heparin is capable of binding is present and this facilitates the binding of ligands with many (+) charged residues. Further, MAM induces oligomerization, trans-membrane domain (TM) enables neuropilin to be fixed onto cell surface, and in a cytosolic domain, a site capable of binding to a Postsynaptic density 95, Disk large, Zona occludens 1 (PDZ) domain is present.1

[0151] The upper four extracellular domains (a1, a2, b1, and b2) determine the binding specificity of multiple ligands to NRP1/2 and the last extracellular c domain, along with the transmembrane domain, is implicated in the dimerization or oligomerization between NRPs and their co-receptors. Both VEGF and Sema3 family ligands specifically bind to the VEGF-binding region in the b1 domain of NRP1/2 through the C-terminal R/K-x-x-R/K sequence motif, where x stands for any amino acid. In fact, all known proteins, and peptides binding to the ligand-binding pocket in the NRP1-b1 domain share the sequence motif. This basic sequence motif in the NRP1-binding ligands and peptides must be exposed at the C-terminus for binding to NRP1, with a stringent requirement for Arg (or rarely Lys) at the last C-terminal residue; this requirement is called the “C-end rule” (CendR)

[0152] Multiple viruses possess CendR motifs within their capsid proteins and may undergo proteolytic cleavage to expose the CendR motif to be infective, most viral envelope glycoproteins need to be proteolytically cleaved before they can mediate viral entry into host cells. In many cases, viruses exploit cellular trypsin- or subtilisin-like endoproteases for this purpose. While subtilisin-like proteases such as furin require polybasic cleavage sites, trypsin-like proteases also recognize monobasic motifs and cleave after single arginine or lysine residues. Furin-mediated cleavage has been described for envelope glycoproteins encoded by numerous evolutionarily diverse virus families, including Herpes-, Corona-, Flavi-, Toga-, Boma-, Bunya-, Filo-, Orthomyxo-, Paramyxo-, Pneumo- and Retroviridae.

[0153] Recently, researchers observed that NRP1 facilitated the ability of SARS-CoV-2 to infect cells during cell culture experiments. Their findings also showed that it was the S1 polypeptide that binds to NRP1. The S1 polypeptide is one to two polypeptides formed when the spike protein of SARS-CoV-2 is cleaved and activated. It contains a sequence that conforms to the C-end rule (CendR).

[0154] In addition, the b1b2 domain of Nrp1 and Nrp2 contain structural determinants capable of C-terminal Sema3F and VEGF binding. An intact b1b2 domain serves as the VEGF165-, PlGF-2-, and heparin-binding sites in NRP1, and that heparin is a critical component for regulating VEGF165 and PlGF-2 interactions with NRP1 by physically interacting with both receptor and ligands.

[0155] The Mutations of VEGF binding pocket within b1 domain changed the binding affinity to VEGF165A. A Y297A/S346A/Y353A mutation of b1 domain cannot bind to VEGF. Also an E319A mutation of b1 domain has a stronger binding affinity to VEGFA with heparin while T349A and K351A mutation of b1 domain has a weaker binding affinity to VEGFA w/ or w/o heparin.

[0156] Neuropilin, a transmembrane glycoprotein, is divided into two types: neuropilin-1 (NRP1; the human NRP1 amino acid sequence is provided as SEQ ID NO:1) and neuropilin-1 (NRP2; the human NRP2 amino acid sequence is provided as SEQ ID NO:1) (Kolodkin et al. 1997). Neuropilin-1 and -2 consist of 923 and 931 amino acids, respectively, and show an amino acid sequence homology of about 44%, and share several structural aspects and biological activities. Neuropilin-1 and -2 consist commonly of extracellular a1, a2, b1, b2 and MAM domains and an intracellular PDZ-binding domain (Appleton et al. 2007). Neuropilin is very weakly expressed in normal cells, but is overexpressed in most tumor-associated endothelial cells, solid tumor cells and blood tumor cells (Grandclement, C. and C. Borg 2011). Neuropilin acts as a co-receptor of VEGF receptors (VEGFRs) by binding to VEGF 25 family ligands. Particularly, NRP1 acts as a co-receptor of VEGFR1, VEGFR2 and VEGFR3 to bind to various VEGF ligands, thereby contributing to angiogenesis, cell migration & adhesion and invasion. On the other hand, NRP2 acts as a co-receptor of VEGFR2 and VEGFR3, thereby contributing lymphangiogenesis and cell adhesion. Furthermore, neuropilin 1 and 2 act as a co-receptor of plexin family receptors to bind to secreted class-3 semaphorin ligands (Sema3A, Sema3B, Sema3C, Sema3D, Sema3E, Sema3F, Sema3G). Since neuropilin has no domain in functional cells, it has no activity by itself, even if a ligand is binding thereto. It is known that neuropilin signal transduction occurs through VEGF receptor, which is a co-receptor, or through plexin co-receptor. Sema3 binds to neuropilin and plexin receptor at a ratio of 2:2:2 and acts. However, many study results show that neuropilin protein alone can perform signal transduction without its interaction with the VEGF receptor or plexin co-receptor. However, an exact molecular mechanism for this signal transduction is still unclear.

[0157] Cases have been reported in which the activities of neuropilin and co-receptor are inhibited even when only neuropilin is targeted. For example, it has been reported that anti-neuropilin-1 antibody binds to only neuropilin-1 competitively with VEGF-A known to bind to VEGFR2 and neuropilin-1, and functions to inhibit angiogenesis, cell survival, migration & adhesion and invasion, which are the actions of VEGFR2 (Pan Q et al. 2007). It has been reported that anti-neuropilin-2 antibody binds to neuropilin-2 competitively with VEGF-C known to binds to both VEGFR3 and neuropilin-2, and functions to inhibit lymphangiogenesis and cell adhesion, which are the operations of VEGFR3 (Caunt M et al. 2008).

[0158] The C-terminal region of each of the VEGF ligand family and Sema3 ligands, which bind to neuropilin 1 and 2, binds to the VEGF-binding sites (so-called arginine-binding pocket) in the b1 domain present commonly in neuropilin 1 and 2 (MW Parker et al. 2012). Herein, binding to the arginine-binding pocket occurs by a motif of R/K-x-x-R/K (R=arginine, K=lysine, and x=any amino acids), which is present commonly in the C-terminal region of neuropilin binding ligands. When mutation is induced with an amino acid sequence deviating from the motif, the ligands have a reduced binding affinity for neuropilin or do not bind to neuropilin, and thus lose their biological activity. Particularly, cationic arginine (Arg) or lysine (Lys) in the C-terminal region is essential for binding, and thus when it is substituted with another amino acid residue, the ligand loses its binding affinity for neuropilin, and loses its biological activity. Accordingly, the necessity of the R/K-x-x-R/K motif in the C-terminal region of such neuropilin binding ligands is called “C-end rule” (CendR) (Teesalu et al. 2009). A protein or peptide containing a C-end rule sequence is capable of binding to neuropilin by the C-terminal arginine (Arg) or lysine (Lys) residue (Zanuy et al, 2013).

[0159] The C-terminal regions of VEGF ligands and Sema3 ligands commonly have the R/K-x-x-R/K motif, and thus most of the ligands have the property of binding to both neuropilin 1 and 2 rather than binding selectively to any one of neuropilin 1 and 2.

[0160] In addition to ligands that bind to neuropilin 1 and 2, many peptides that bind to neuropilin have been selected or designed and reported. These peptides all have the R/K-x-x-R/K motif, and thus appear to bind to the arginine-binding pocket in the b1 domain of neuropilin 1 and 2. Furthermore, an iRGD peptide (Sugahara et al. 2010) that binds to neuropilin 1 and 2 to increase tumor tissue penetration of a co-administered drug, and an A22p peptide (Shin et al. 2014) that is fused to the heavy-chain end of an antibody to increase tumor tissue penetration of the antibody, also have amino acid sequences, following the CendR rule.

[0161] The neuropilin domain, or a derivative or fragment thereof, as used herein includes a b1 domain, or a derivative or fragment thereof. Table 1 provides several exemplary neuropilin domains, but not limited to the full-length NRP1 and NRP2 portions in addition to several smaller domains.

TABLE 1
Neuropilin Domains (SEQ ID NOs: 1-22).

| Combined | SEQ ID | | |
|---|---|---|---|
| Name | NO: | Length | Sequence |
| NRP1 Full- | 1 | 923 | MERGLPLLCAVLALVLAPAGAFRNDKCGDTIKIESPGYL |
| length | | | TSPGYPHSYHPSEKCEWLIQAPDPYQRIMINFNPHFDLE |
| | | | DRDCKYDYVEVFDGENENGHFRGKFCGKIAPPPVVSSGP |
| | | | FLFIKFVSDYETHGAGFSIRYEIFKRGPECSQNYTTPSG |
| | | | VIKSPGFPEKYPNSLECTYIVFVPKMSEIILEFESFDLE |
| | | | PDSNPPGGMFCRYDRLEIWDGFPDVGPHIGRYCGQKTPG |
| | | | RIRSSSGILSMVFYTDSAIAKEGFSANYSVLQSSVSEDF |
| | | | KCMEALGMESGEIHSDQITASSQYSTNWSAERSRLNYPE |
| | | | NGWTPGEDSYREWIQVDLGLLRFVTAVGTQGAISKETKK |
| | | | KYYVKTYKIDVSSNGEDWITIKEGNKPVLFQGNTNPTDV |
| | | | VVAVFPKPLITRFVRIKPATWETGISMRFEVYGCKITDY |
| | | | PCSGMLGMVSGLISDSQITSSNQGDRNWMPENIRLVTSR |
| | | | SGWALPPAPHSYINEWLQIDLGEEKIVRGIIIQGGKHRE |
| | | | NKVFMRKFKIGYSNNGSDWKMIMDDSKRKAKSFEGNNNY |
| | | | DTPELRTFPALSTRFIRIYPERATHGGLGLRMELLGCEV |
| | | | EAPTAGPTTPNGNLVDECDDDQANCHSGTGDDFQLTGGT |
| | | | TVLATEKPTVIDSTIQSEFPTYGFNCEFGWGSHKTFCHW |
| | | | EHDNHVQLKWSVLTSKTGPIQDHTGDGNFIYSQADENQK |
| | | | GKVARLVSPVVYSQNSAHCMTFWYHMSGSHVGTLRVKLR |
| | | | YQKPEEYDQLVWMAIGHQGDHWKEGRVLLHKSLKLYQVI |
| | | | FEGEIGKGNLGGIAVDDISINNHISQEDCAKPADLDKKN |
| | | | PEIKIDETGSTPGYEGEGEGDKNISRKPGNVLKTLDPIL |
| | | | ITIIAMSALGVLLGAVCGVVLYCACWHNGMSERNLSALE |
| | | | NYNFELVDGVKLKKDKLNTQSTYSEA |
| NRP2 Full- | 2 | 926 | MDMFPLTWVFLALYFSRHQVRGQPDPPCGGRLNSKDAGY |
| length | | | ITSPGYPQDYPSHQNCEWIVYAPEPNQKIVLNFNPHFEI |
| | | | EKHDCKYDFIEIRDGDSESADLLGKHCGNIAPPTIISSG |
| | | | SMLYIKFTSDYARQGAGFSLRYEIFKTGSEDCSKNFTSP |
| | | | NGTIESPGFPEKYPHNLDCTFTILAKPKMEIILQFLIFD |
| | | | LEHDPLQVGEGDCKYDWLDIWDGIPHVGPLIGKYCGTKT |
| | | | PSELRSSTGILSLTFHTDMAVAKDGFSARYYLVHQEPLE |
| | | | NFQCNVPLGMESGRIANEQISASSTYSDGRWTPQQSRLH |
| | | | GDDNGWTPNLDSNKEYLQVDLRFLTMLTAIATQGAISRE |
| | | | TONGYYVKSYKLEVSTNGEDWMVYRHGKNHKVFQANNDA |
| | | | TEVVLNKLHAPLLTRFVRIRPQTWHSGIALRLELFGCRV |
| | | | TDAPCSNMLGMLSGLIADSQISASSTQEYLWSPSAARLV |
| | | | SSRSGWFPRIPQAQPGEEWLQVDLGTPKTVKGVIIQGAR |
| | | | GGDSITAVEARAFVRKFKVSYSLNGKDWEYIQDPRTQQP |
| | | | KLFEGNMHYDTPDIRRFDPIPAQYVRVYPERWSPAGIGM |
| | | | RLEVLGCDWTDSKPTVETLGPTVKSEETTTPYPTEEEAT |
| | | | ECGENCSFEDDKDLQLPSGFNCNFDFLEEPCGWMYDHAK |
| | | | WLRTTWASSSSPNDRTFPDDRNFLRLQSDSQREGQYARL |
| | | | ISPPVHLPRSPVCMEFQYQATGGRGVALQVVREASQESK |
| | | | LLWVIREDQGGEWKHGRIILPSYDMEYQIVFEGVIGKGR |
| | | | SGEIAIDDIRISTDVPLENCMEPISAFAVDIPEIHEREG |
| | | | YEDEIDDEYEVDWSNSSSATSGSGAPSTDKEKSWLYTLD |
| | | | PILITIIAMSSLGVLLGATCAGLLLYCTCSYSGLSSRSC |
| | | | TTLENYNFELYDGLKHKVKMNHQKCCSEA |
| NRP1 (b1) | 3 | 150 | CMEALGMESGEIHSDQITASSQYSTNWSAERSRLNYPEN |
| | | | GWTPGEDSYREWIQVDLGLLRFVTAVGTQGAISKETKKK |
| | | | YYVKTYKIDVSSNGEDWITIKEGNKPVLFQGNTNPTDVV |
| | | | VAVFPKPLITRFVRIKPATWETGISMRFEVYGC |
| NRP1 (b1)- | 4 | 150 | CMEALGMESGEIHSDQITASSQYSTNWSAERSRLNYPEN |
| E319A | | | GWTPGADSYREWIQVDLGLLRFVTAVGTQGAISKETKKK |
| | | | YYVKTYKIDVSSNGEDWITIKEGNKPVLFQGNTNPTDVV |
| | | | VAVFPKPLITRFVRIKPATWETGISMRFEVYGC |
| NRP1 (b1)- | 5 | 150 | CMEALGMESGEIHSDQITASSQYSTNWSAERSRLNYPEN |
| K351A | | | GWTPGEDSYREWIQVDLGLLRFVTAVGTQGAISKETKAK |
| | | | YYVKTYKIDVSSNGEDWITIKEGNKPVLFQGNTNPTDVV |
| | | | VAVFPKPLITRFVRIKPATWETGISMRFEVYGC |
| NRP1 (b1)- | 6 | 150 | CMEALGMESGEIHSDQITASSQASTNWSAERSRLNYPEN |
| Y297A/S346A/ | | | GWTPGEDSYREWIQVDLGLLRFVTAVGTQGAIAKETKKK |
| Y353A | | | AYVKTYKIDVSSNGEDWITIKEGNKPVLFQGNTNPTDVV |
| | | | VAVFPKPLITRFVRIKPATWETGISMRFEVYGC |
| NRP1 (b1b2) | 7 | 309 | CMEALGMESGEIHSDQITASSQYSTNWSAERSRLNYPEN |
| | | | GWTPGEDSYREWIQVDLGLLRFVTAVGTQGAISKETKKK |
| | | | YYVKTYKIDVSSNGEDWITIKEGNKPVLFQGNTNPTDVV |
| | | | VAVFPKPLITRFVRIKPATWETGISMRFEVYGCKITDYP |
| | | | CSGMLGMVSGLISDSQITSSNQGDRNWMPENIRLVTSRS |
| | | | GWALPPAPHSYINEWLQIDLGEEKIVRGIIIQGGKHREN |
| | | | KVFMRKFKIGYSNNGSDWKMIMDDSKRKAKSFEGNNNYD |
| | | | TPELRTFPALSTRFIRIYPERATHGGLGLRMELLGC |
| NRP1 (b1b2)- | 8 | 309 | CMEALGMESGEIHSDQITASSQYSTNWSAERSRLNYPEN |
| E319A | | | GWTPGADSYREWIQVDLGLLRFVTAVGTQGAISKETKKK |
| | | | YYVKTYKIDVSSNGEDWITIKEGNKPVLFQGNTNPTDVV |
| | | | VAVFPKPLITRFVRIKPATWETGISMRFEVYGCKITDYP |
| | | | CSGMLGMVSGLISDSQITSSNQGDRNWMPENIRLVTSRS |
| | | | GWALPPAPHSYINEWLQIDLGEEKIVRGIIIQGGKHREN |
| | | | KVFMRKFKIGYSNNGSDWKMIMDDSKRKAKSFEGNNNYD |
| | | | TPELRTFPALSTRFIRIYPERATHGGLGLRMELLGC |
| NRP1 (b1b2)- | 9 | 309 | CMEALGMESGEIHSDQITASSQYSTNWSAERSRLNYPEN |
| K351A | | | GWTPGEDSYREWIQVDLGLLRFVTAVGTQGAISKETKAK |
| | | | YYVKTYKIDVSSNGEDWITIKEGNKPVLFQGNTNPTDVV |
| | | | VAVFPKPLITRFVRIKPATWETGISMRFEVYGCKITDYP |
| | | | CSGMLGMVSGLISDSQITSSNQGDRNWMPENIRLVTSRS |
| | | | GWALPPAPHSYINEWLQIDLGEEKIVRGIIIQGGKHREN |
| | | | KVFMRKFKIGYSNNGSDWKMIMDDSKRKAKSFEGNNNYD |
| | | | TPELRTFPALSTRFIRIYPERATHGGLGLRMELLGC |
| NRP1 (b1b2)- | 10 | 309 | CMEALGMESGEIHSDQITASSQASTNWSAERSRLNYPEN |
| Y297A/S346A/ | | | GWTPGEDSYREWIQVDLGLLRFVTAVGTQGAIAKETKKK |
| Y353A | | | AYVKTYKIDVSSNGEDWITIKEGNKPVLFQGNTNPTDVV |
| | | | VAVFPKPLITRFVRIKPATWETGISMRFEVYGCKITDYP |
| | | | CSGMLGMVSGLISDSQITSSNQGDRNWMPENIRLVTSRS |
| | | | GWALPPAPHSYINEWLQIDLGEEKIVRGIIIQGGKHREN |
| | | | KVFMRKFKIGYSNNGSDWKMIMDDSKRKAKSFEGNNNYD |
| | | | TPELRTFPALSTRFIRIYPERATHGGLGLRMELLGC |
| NRP2 (b1) | 11 | 152 | CNVPLGMESGRIANEQISASSTYSDGRWTPQQSRLHGDD |
| | | | NGWTPNLDSNKEYLQVDLRFLTMLTAIATQGAISRETQN |
| | | | GYYVKSYKLEVSTNGEDWMVYRHGKNHKVFQANNDATEV |
| | | | VLNKLHAPLLTRFVRIRPQTWHSGIALRLELFGC |
| NRP2 (b1)- | 12 | 152 | CNVPLGMESGRIANEQISASSTASDGRWTPQQSRLHGDD |
| Y297A/S346A/ | | | NGWTPNLDSNKEYLQVDLRFLTMLTAIATQGAIARETQN |
| Y353A | | | GAYVKSYKLEVSTNGEDWMVYRHGKNHKVFQANNDATEV |
| | | | VLNKLHAPLLTRFVRIRPQTWHSGIALRLELFGC |
| NRP2 (b1b2) | 13 | 316 | CNVPLGMESGRIANEQISASSTYSDGRWTPQQSRLHGDD |
| | | | NGWTPNLDSNKEYLQVDLRFLTMLTAIATQGAISRETQN |
| | | | GYYVKSYKLEVSTNGEDWMVYRHGKNHKVFQANNDATEV |
| | | | VLNKLHAPLLTRFVRIRPQTWHSGIALRLELFGCRVTDA |
| | | | PCSNMLGMLSGLIADSQISASSTQEYLWSPSAARLVSSR |
| | | | SGWFPRIPQAQPGEEWLQVDLGTPKTVKGVIIQGARGGD |
| | | | SITAVEARAFVRKFKVSYSLNGKDWEYIQDPRTQQPKLF |
| | | | EGNMHYDTPDIRRFDPIPAQYVRVYPERWSPAGIGMRLE |
| | | | VLGC |
| NRP2 (b1b2)- | 14 | 316 | CNVPLGMESGRIANEQISASSTASDGRWTPQQSRLHGDD |
| Y297A/S346A/ | | | NGWTPNLDSNKEYLQVDLRFLTMLTAIATQGAIARETQN |
| Y353A | | | GAYVKSYKLEVSTNGEDWMVYRHGKNHKVFQANNDATEV |
| | | | VLNKLHAPLLTRFVRIRPQTWHSGIALRLELFGCRVTDA |
| | | | PCSNMLGMLSGLIADSQISASSTQEYLWSPSAARLVSSR |
| | | | SGWFPRIPQAQPGEEWLQVDLGTPKTVKGVIIQGARGGD |
| | | | SITAVEARAFVRKFKVSYSLNGKDWEYIQDPRTQQPKLF |
| | | | EGNMHYDTPDIRRFDPIPAQYVRVYPERWSPAGIGMRLE |
| | | | VLGC |
| NRP1 (b1b1)- | 15 | 622 | CMEALGMESGEIHSDQITASSQYSTNWSAERSRLNYPEN |
| (G4S)₂-(b1b1) | | | GWTPGEDSYREWIQVDLGLLRFVTAVGTQGAISKETKKK |
| | | | YYVKTYKIDVSSNGEDWITIKEGNKPVLFQGNTNPTDVV |
| | | | VAVFPKPLITRFVRIKPATWETGISMRFEVYGCKITDYP |
| | | | CMEALGMESGEIHSDQITASSQYSTNWSAERSRLNYPEN |
| | | | GWTPGEDSYREWIQVDLGLLRFVTAVGTQGAISKETKKK |
| | | | YYVKTYKIDVSSNGEDWITIKEGNKPVLFQGNTNPTDVV |
| | | | VAVFPKPLITRFVRIKPATWETGISMRFEVYGCGGGGSG |
| | | | GGGSCMEALGMESGEIHSDQITASSQYSTNWSAERSRLN |
| | | | YPENGWTPGEDSYREWIQVDLGLLRFVTAVGTQGAISKE |
| | | | TKKKYYVKTYKIDVSSNGEDWITIKEGNKPVLFQGNTNP |
| | | | TDVVVAVFPKPLITRFVRIKPATWETGISMRFEVYGCKI |
| | | | TDYPCMEALGMESGEIHSDQITASSQYSTNWSAERSRLN |
| | | | YPENGWTPGEDSYREWIQVDLGLLRFVTAVGTQGAISKE |
| | | | TKKKYYVKTYKIDVSSNGEDWITIKEGNKPVLFQGNTNP |
| | | | TDVVVAVFPKPLITRFVRIKPATWETGISMRFEVYGC |
| NRP1 (b1b2)- | 16 | 628 | CMEALGMESGEIHSDQITASSQYSTNWSAERSRLNYPEN |
| (G4S)₂-(b1b2) | | | GWTPGEDSYREWIQVDLGLLRFVTAVGTQGAISKETKKK |
| | | | YYVKTYKIDVSSNGEDWITIKEGNKPVLFQGNTNPTDVV |
| | | | VAVFPKPLITRFVRIKPATWETGISMRFEVYGCKITDYP |
| | | | CSGMLGMVSGLISDSQITSSNQGDRNWMPENIRLVTSRS |
| | | | GWALPPAPHSYINEWLQIDLGEEKIVRGIIIQGGKHREN |
| | | | KVFMRKFKIGYSNNGSDWKMIMDDSKRKAKSFEGNNNYD |
| | | | TPELRTFPALSTRFIRIYPERATHGGLGLRMELLGCGGG |
| | | | GSGGGGSCMEALGMESGEIHSDQITASSQYSTNWSAERS |
| | | | RLNYPENGWTPGEDSYREWIQVDLGLLRFVTAVGTQGAI |
| | | | SKETKKKYYVKTYKIDVSSNGEDWITIKEGNKPVLFQGN |
| | | | TNPTDVVVAVFPKPLITRFVRIKPATWETGISMRFEVYG |
| | | | CKITDYPCSGMLGMVSGLISDSQITSSNQGDRNWMPENI |
| | | | RLVTSRSGWALPPAPHSYINEWLQIDLGEEKIVRGIIIQ |
| | | | GGKHRENKVFMRKFKIGYSNNGSDWKMIMDDSKRKAKSF |
| | | | EGNNNYDTPELRTFPALSTRFIRIYPERATHGGLGLRME |
| | | | LLGC |
| NRP1 (b1b2)- | 17 | 628 | CMEALGMESGEIHSDQITASSQYSTNWSAERSRLNYPEN |
| (G4S)₂-(b1b2) | | | GWTPGADSYREWIQVDLGLLRFVTAVGTQGAISKETKKK |
| with | | | YYVKTYKIDVSSNGEDWITIKEGNKPVLFQGNTNPTDVV |
| b1(E319A) | | | VAVFPKPLITRFVRIKPATWETGISMRFEVYGCKITDYP |
| | | | CSGMLGMVSGLISDSQITSSNQGDRNWMPENIRLVTSRS |
| | | | GWALPPAPHSYINEWLQIDLGEEKIVRGIIIQGGKHREN |
| | | | KVFMRKFKIGYSNNGSDWKMIMDDSKRKAKSFEGNNNYD |
| | | | TPELRTFPALSTRFIRIYPERATHGGLGLRMELLGCGGG |
| | | | GSGGGGSCMEALGMESGEIHSDQITASSQYSTNWSAERS |
| | | | RLNYPENGWTPGADSYREWIQVDLGLLRFVTAVGTQGAI |
| | | | SKETKKKYYVKTYKIDVSSNGEDWITIKEGNKPVLFQGN |
| | | | TNPTDVVVAVFPKPLITRFVRIKPATWETGISMRFEVYG |
| | | | CKITDYPCSGMLGMVSGLISDSQITSSNQGDRNWMPENI |
| | | | RLVTSRSGWALPPAPHSYINEWLQIDLGEEKIVRGIIIQ |
| | | | GGKHRENKVFMRKFKIGYSNNGSDWKMIMDDSKRKAKSF |
| | | | EGNNNYDTPELRTFPALSTRFIRIYPERATHGGLGLRME |
| | | | LLGC |
| NRP1 (b1b2)- | 18 | 628 | CMEALGMESGEIHSDQITASSQYSTNWSAERSRLNYPEN |
| (G4S)₂-(b1b2) | | | GWTPGEDSYREWIQVDLGLLRFVTAVGTQGAISKETKAK |
| with | | | YYVKTYKIDVSSNGEDWITIKEGNKPVLFQGNTNPTDVV |
| b1(K351A) | | | VAVFPKPLITRFVRIKPATWETGISMRFEVYGCKITDYP |
| | | | CSGMLGMVSGLISDSQITSSNQGDRNWMPENIRLVTSRS |
| | | | GWALPPAPHSYINEWLQIDLGEEKIVRGIIIQGGKHREN |
| | | | KVFMRKFKIGYSNNGSDWKMIMDDSKRKAKSFEGNNNYD |
| | | | TPELRTFPALSTRFIRIYPERATHGGLGLRMELLGCGGG |
| | | | GSGGGGSCMEALGMESGEIHSDQITASSQYSTNWSAERS |
| | | | RLNYPENGWTPGEDSYREWIQVDLGLLRFVTAVGTQGAI |
| | | | SKETKAKYYVKTYKIDVSSNGEDWITIKEGNKPVLFQGN |
| | | | TNPTDVVVAVFPKPLITRFVRIKPATWETGISMRFEVYG |
| | | | CKITDYPCSGMLGMVSGLISDSQITSSNQGDRNWMPENI |
| | | | RLVTSRSGWALPPAPHSYINEWLQIDLGEEKIVRGIIIQ |
| | | | GGKHRENKVFMRKFKIGYSNNGSDWKMIMDDSKRKAKSF |
| | | | EGNNNYDTPELRTFPALSTRFIRIYPERATHGGLGLRME |
| | | | LLGC |
| NRP1 (b1b2)- | 19 | 628 | CMEALGMESGEIHSDQITASSQASTNWSAERSRLNYPEN |
| (G4S)₂-(b1b2) | | | GWTPGEDSYREWIQVDLGLLRFVTAVGTQGAIAKETKKK |
| with | | | AYVKTYKIDVSSNGEDWITIKEGNKPVLFQGNTNPTDVV |
| (Y297A/S346A/ | | | VAVFPKPLITRFVRIKPATWETGISMRFEVYGCKITDYP |
| Y353A) | | | CSGMLGMVSGLISDSQITSSNQGDRNWMPENIRLVTSRS |
| | | | GWALPPAPHSYINEWLQIDLGEEKIVRGIIIQGGKHREN |
| | | | KVFMRKFKIGYSNNGSDWKMIMDDSKRKAKSFEGNNNYD |
| | | | TPELRTFPALSTRFIRIYPERATHGGLGLRMELLGCGGG |
| | | | GSGGGGSCMEALGMESGEIHSDQITASSQASTNWSAERS |
| | | | RLNYPENGWTPGEDSYREWIQVDLGLLRFVTAVGTQGAI |
| | | | AKETKKKAYVKTYKIDVSSNGEDWITIKEGNKPVLFQGN |
| | | | TNPTDVVVAVFPKPLITRFVRIKPATWETGISMRFEVYG |
| | | | CKITDYPCSGMLGMVSGLISDSQITSSNQGDRNWMPENI |
| | | | RLVTSRSGWALPPAPHSYINEWLQIDLGEEKIVRGIIIQ |
| | | | GGKHRENKVFMRKFKIGYSNNGSDWKMIMDDSKRKAKSF |
| | | | EGNNNYDTPELRTFPALSTRFIRIYPERATHGGLGLRME |
| | | | LLGC |
| NRP2 (b1b1)- | 20 | 624 | CNVPLGMESGRIANEQISASSTYSDGRWTPQQSRLHGDD |
| (G4S)₂-(b1b1) | | | NGWTPNLDSNKEYLQVDLRFLTMLTAIATQGAISRETQN |
| | | | GYYVKSYKLEVSTNGEDWMVYRHGKNHKVFQANNDATEV |
| | | | VLNKLHAPLLTRFVRIRPQTWHSGIALRLELFGCRVTDA |
| | | | CNVPLGMESGRIANEQISASSTYSDGRWTPQQSRLHGDD |
| | | | NGWTPNLDSNKEYLQVDLRFLTMLTAIATQGAISRETQN |
| | | | GYYVKSYKLEVSTNGEDWMVYRHGKNHKVFQANNDATEV |
| | | | VLNKLHAPLLTRFVRIRPQTWHSGIALRLELFGCGGGGS |
| | | | GGGGSCNVPLGMESGRIANEQISASSTYSDGRWTPQQSR |
| | | | LHGDDNGWTPNLDSNKEYLQVDLRFLTMLTAIATQGAIS |
| | | | RETQNGYYVKSYKLEVSTNGEDWMVYRHGKNHKVFQANN |
| | | | DATEVVLNKLHAPLLTRFVRIRPQTWHSGIALRLELFGC |
| | | | RVTDACNVPLGMESGRIANEQISASSTYSDGRWTPQQSR |
| | | | LHGDDNGWTPNLDSNKEYLQVDLRFLTMLTAIATQGAIS |
| | | | RETQNGYYVKSYKLEVSTNGEDWMVYRHGKNHKVFQANN |
| | | | DATEVVLNKLHAPLLTRFVRIRPQTWHSGIALRLELFGC |
| NRP2 (b1b2)- | 21 | 642 | CNVPLGMESGRIANEQISASSTYSDGRWTPQQSRLHGDD |
| (G4S)₂-(b1b2) | | | NGWTPNLDSNKEYLQVDLRFLTMLTAIATQGAISRETQN |
| | | | GYYVKSYKLEVSTNGEDWMVYRHGKNHKVFQANNDATEV |
| | | | VLNKLHAPLLTRFVRIRPQTWHSGIALRLELFGCRVTDA |
| | | | PCSNMLGMLSGLIADSQISASSTQEYLWSPSAARLVSSR |
| | | | SGWFPRIPQAQPGEEWLQVDLGTPKTVKGVIIQGARGGD |
| | | | SITAVEARAFVRKFKVSYSLNGKDWEYIQDPRTQQPKLF |
| | | | EGNMHYDTPDIRRFDPIPAQYVRVYPERWSPAGIGMRLE |
| | | | VLGCGGGGSGGGGSCNVPLGMESGRIANEQISASSTYSD |
| | | | GRWTPQQSRLHGDDNGWTPNLDSNKEYLQVDLRFLTMLT |
| | | | AIATQGAISRETQNGYYVKSYKLEVSTNGEDWMVYRHGK |
| | | | NHKVFQANNDATEVVLNKLHAPLLTRFVRIRPQTWHSGI |
| | | | ALRLELFGCRVTDAPCSNMLGMLSGLIADSQISASSTQE |
| | | | YLWSPSAARLVSSRSGWFPRIPQAQPGEEWLQVDLGTPK |
| | | | TVKGVIIQGARGGDSITAVEARAFVRKFKVSYSLNGKDW |
| | | | EYIQDPRTQQPKLFEGNMHYDTPDIRRFDPIPAQYVRVY |
| | | | PERWSPAGIGMRLEVLGC |
| NRP2 (b1b2)- | 22 | 642 | CNVPLGMESGRIANEQISASSTASDGRWTPQQSRLHGDD |
| (G4S)₂-(b1b2) | | | NGWTPNLDSNKEYLQVDLRFLTMLTAIATQGAIARETQN |
| with | | | GAYVKSYKLEVSTNGEDWMVYRHGKNHKVFQANNDATEV |
| (Y297A/S346A/ | | | VLNKLHAPLLTRFVRIRPQTWHSGIALRLELFGCRVTDA |
| Y353A) | | | PCSNMLGMLSGLIADSQISASSTQEYLWSPSAARLVSSR |
| | | | SGWFPRIPQAQPGEEWLQVDLGTPKTVKGVIIQGARGGD |
| | | | SITAVEARAFVRKFKVSYSLNGKDWEYIQDPRTQQPKLF |
| | | | EGNMHYDTPDIRRFDPIPAQYVRVYPERWSPAGIGMRLE |
| | | | VLGCGGGGSGGGGSCNVPLGMESGRIANEQISASSTASD |
| | | | GRWTPQQSRLHGDDNGWTPNLDSNKEYLQVDLRFLTMLT |
| | | | AIATQGAIARETQNGAYVKSYKLEVSTNGEDWMVYRHGK |
| | | | NHKVFQANNDATEVVLNKLHAPLLTRFVRIRPQTWHSGI |
| | | | ALRLELFGCRVTDAPCSNMLGMLSGLIADSQISASSTQE |
| | | | YLWSPSAARLVSSRSGWFPRIPQAQPGEEWLQVDLGTPK |
| | | | TVKGVIIQGARGGDSITAVEARAFVRKFKVSYSLNGKDW |
| | | | EYIQDPRTQQPKLFEGNMHYDTPDIRRFDPIPAQYVRVY |
| | | | PERWSPAGIGMRLEVLGC |

[0162] Immunoglobulins

[0163] In some embodiments, the polypeptides of the present invention comprise an immunoglobulin domain. The immunoglobulin domain can be derived from an immunoglobulin molecule from any mammal. In one embodiment, the immunoglobulin domain is derived from a human immunoglobulin, and can be derived from an immunoglobulin isotype selected from the group consisting of IgG, IgA, and IgD antibody isotypes. In a particular embodiment, the immunoglobulin domain is derived from an IgG isotype. In still another embodiment, the immunoglobulin domain is derived from a subclass of IgG selected from the group consisting of IgG1, IgG2, and IgG4.

[0164] As the biocompatible material capable of increasing the half-life of a physiologically active polypeptide linked thereto, IgG Fc regions including a hinge region were selected.

[0165] In order to reduce this unintended effector function, human IgG4 variant L235E or F234A/L235A, and the human IgG1 variant L234A/L235A were generated, all of which reduced inflammatory cytokine release. Another early approach intended to reduce effector function was to mutate the glycosylation site at N297 with mutations such as N297A, N297Q, and N297G. This glycosylation approach has proven successful in abrogating Fc interactions with the low affinity FcγRs and effector functions such as CDC and ADCC. Among the four IgG subclasses, each has a different ability to elicit immune effector functions. For instance, IgG1 and IgG3 have been recognized to recruit complement more effectively than IgG2 and IgG4. Additionally, IgG2 and IgG4 have very limited ability to elicit ADCC. Therefore, several investigators have employed a cross-subclass approach to reduce effector function.

[0166] FcRn is known to prolong the half-life of IgG, the obvious strategy has been to modulate FcRn-IgG interaction to either extend or shorten the antibody half-life. Half-life extension of therapeutic antibodies would help maintain drug therapeutic levels and reduce the frequency of administration, while half-life reduction would be ideal for diagnostic tests or toxicity control.

[0167] Attempts to prolong antibody half-life by mutations of the Fc region critical for FcRn binding have been relatively successful. However, increasing Fc to FcRn binding does not necessarily prolong serum half-life. In fact, IgG1 mutants created to significantly increase binding at pH 6.0 as well as pH 7.4 did not contribute to increase serum half-life, but instead offset the benefit of enhanced binding at pH 6.0 alone. It is believed that FcRn-IgG binding at pH 7.4 prevents IgG release into the circulation and instead diverts it to the degradation pathway. Furthermore, it has been suggested that the rate of dissociation at pH 7.4 is equally or perhaps more important in determining serum half-life.

[0168] Among a previous comprehensive screen of Fc mutations in FcRn binding study, N434A and T307A/E380A/N434A (AAA), were shown to have 3.4-fold and 11.8-fold increases in binding to FcRn (human). Substitutions in trastuzumab resulted in 1.3- and 3.3-fold increases in binding to FcRn (human) using a cell based assay and 2.2- and 2.5-fold increases in the serum half-life in mice that expressed the human FcRn transgene and deficient in the endogenous FcRn (hFcRn-Tg).

[0169] The fusion proteins to bind spike protein of virus comprises the IgG Fc region which includes a hinge region, ACE2 (angiotensin-converting enzyme 2) fragment which includes a spike protein binding region and NRP (Neuropilin) fragment which includes a CendR binding region using a linker or by a method of direct fusion.

[0170] In some embodiments, the polypeptides of the present invention comprise an immunoglobulin domain which includes a portion of the heavy chain. In one embodiment, the immunoglobulin domain comprises the fragment crystallizable (Fc) domain, which comprises hinge-CH2-CH3 of the antibody. In a particular embodiment, the polypeptide comprises an immunoglobulin domain that comprises an Fc domain selected from the IgG1 and IgG2 subclass.

[0171] In some embodiments, the immunoglobulin domain comprises a modified Fc domain.

[0172] For example, in certain embodiments, it may be preferable to have increased affinity for the Fc Fragment of IgG Receptor and Transporter (FcRn). In adults, FcRn is expressed in epithelial tissue. FcRn is able to carry out diverse roles through the transport and recycling of bound IgG within and across cells. Antibodies and other Fc containing peptides are internalized via binding with the FcRn and are targeted to the acidic endosomes and lysosomes of the cells for degradation. Therefore, in certain embodiments, the polypeptides comprise an immunoglobulin domain containing an Fc domain with increased binding affinity for FcRn. In one embodiment, the immunoglobulin domain comprises an amino acid sequence selected from the group consisting of SEQ ID NOs: 24, 27 and 29.

[0173] In other embodiments, it may be desirable to have reduced affinity for one or more Fcγ receptors. In some instances, such as HIV and dengue virus, the virus-antibody complex that binds to Fcγ receptors (FcγR) results in the virus coming into close proximity to the virus-specific receptor, resulting in infection. As such, a virus complexed with an antibody may result in a phenomenon referred to as Antibody-Dependent Enhancement (ADE) of infection. Therefore, in certain embodiments, the polypeptide comprises an immunoglobulin domain comprising an Fc domain with reduced affinity for one or more Fcγ receptors. In one embodiment, the immunoglobulin domain comprises an amino acid sequence selected from the group consisting of SEQ ID NOs: 26 and 28.

[0174] In still other embodiments, it may be desirable to reduce the antibody-dependent cellular cytotoxicity (ADCC) elicited by the immunoglobulin domain. In some instances, hyperactivation of ADCC may result in an uncontrolled, high release of cytokines, precipitating in a “cytokine storm”. In other instances, ADCC may result in internalization of the virus particle into susceptible target cells. As such, in one embodiment, the polypeptide comprises an immunoglobulin domain that is deficient in eliciting ADCC. In one embodiment, the polypeptide comprises an immunoglobulin domain comprising an Fc domain with reduced ADCC, for example, containing an N297A mutation. In one embodiment, the immunoglobulin domain comprises an amino acid sequence selected from the group consisting of SEQ ID NOs: 25 and 27.

[0175] The term “heavy chain” as used herein may be interpreted to include a full-length heavy chain including heavy chain variable region domain VH including an amino acid sequence having a variable region sequence sufficient to confer antigen-specificity and three heavy chain constant region domains CH1, CH2 and CH3, and a fragment thereof. Also, the term “light chain” as used herein may be interpreted to include a full-length light chain including a light chain variable region domain VL including an amino acid sequence having a variable region sequence sufficient to confer antigen-specificity and a light chain constant region domain CL, and a fragment thereof.

[0176] Moreover, the antibody fragment may be a monomer, a dimer, or a multimer.

[0177] The antibody includes monoclonal antibodies, non-specific antibodies, non-human antibodies, human antibodies, humanized antibodies, chimeric antibodies, single-chain Fvs (scFV), single chain antibodies, Fab fragments, F(ab′) fragments, disulfide-linked Fvs (sdFV) and anti-idiotype (anti-Id) antibodies, and epitope-binding fragments of these antibodies, but is not limited thereto.

[0178] The monoclonal antibody may be IgG, IgM, IgA, IgD, or IgE. For example, the monoclonal antibody may be IgG1, IgG2, IgG3, IgG4, IgM, IgE, IgAl, IgA5, or IgD type, and may be IgG1 type. In addition, the light-chain constant region of the antibody may be of k or K type.

[0179] The peptide may bind to a heavy chain constant region (Fc) fragment of an antibody, preferably to the C-terminus of a heavy chain constant region (Fc) fragment of an antibody. The binding may be performed by a linker peptide.

[0180] In some embodiments, the polypeptides of the present invention comprise an Fc domain.

[0181] Table 2 provides several exemplary immunoglobulin domains used in the therapeutic polypeptides described herein.

```
TABLE 2
Immunoglobulin Domains (SEQ ID NOs: 23-31). Amino acid mutations are shown
  in parenthesis where applicable. The column labeled effect describes
  the characteristics possessed by an IgG as bestowed by a given mutation.
```

| | | | SEQ ID | | |
|---|---|---|---|---|---|
| IgG Name | Effect | Source | NO: | Length | Sequence |
| IgG1 WT | NA | IgG1 | 23 | 232 | EPKSCDKTHTCPPCPAPELLGGPSVFLFPPKPKDTLMISR |
| | | | | | TPEVTCVVVDVSHEDPEVKFNWYVDGVEVHNAKTKPREEQ |
| | | | | | YNSTYRVVSVLTVLHQDWLNGKEYKCKVSNKALPAPIEKT |
| | | | | | ISKAKGQPREPQVYTLPPSRDELTKNQVSLTCLVKGFYPS |
| | | | | | DIAVEWESNGQPENNYKTTPPVLDSDGSFFLYSKLTVDKS |
| | | | | | RWQQGNVFSCSVMHEALHNHYTQKSLSLSPGK |
| IgG1 | Increased FcRn | IgG1 | 24 | 232 | EPKSCDKTHTCPPCPAPELLGGPSVFLFPPKPKDTLMISR |
| (T307A/E380A/ | binding | | | | TPEVTCVVVDVSHEDPEVKFNWYVDGVEVHNAKTKPREEQ |
| N434A) | | | | | YNSTYRVVSVLAVLHQDWLNGKEYKCKVSNKALPAPIEKT |
| | | | | | ISKAKGQPREPQVYTLPPSRDELTKNQVSLTCLVKGFYPS |
| | | | | | DIAVAWESNGQPENNYKTTPPVLDSDGSFFLYSKLTVDKS |
| | | | | | RWQQGNVFSCSVMHEALHAHYTQKSLSLSPGK |
| IgG1 (N297A) | No ADCC | IgG1 | 25 | 232 | EPKSCDKTHTCPPCPAPELLGGPSVFLFPPKPKDTLMISR |
| | | | | | TPEVTCVVVDVSHEDPEVKFNWYVDGVEVHNAKTKPREEQ |
| | | | | | YNSTYRVVSVLAVLHQDWLNGKEYKCKVSNKALPAPIEKT |
| | | | | | ISKAKGQPREPQVYTLPPSRDELTKNQVSLTCLVKGFYPS |
| | | | | | DIAVAWESNGQPENNYKTTPPVLDSDGSFFLYSKLTVDKS |
| | | | | | RWQQGNVFSCSVMHEALHAHYTQKSLSLSPGK |
| IgG1 | LALA mutation | IgG1 | 26 | 232 | EPKSCDKTHTCPPCPAPEAAGGPSVFLFPPKPKDTLMISR |
| (L324A/L325A) | (removes Fc | | | | TPEVTCVVVDVSHEDPEVKFNWYVDGVEVHNAKTKPREEQ |
| | gamma receptor | | | | YNSTYRVVSVLTVLHQDWLNGKEYKCKVSNKALPAPIEKT |
| | binding) | | | | ISKAKGQPREPQVYTLPPSRDELTKNQVSLTCLVKGFYPS |
| | | | | | DIAVEWESNGQPENNYKTTPPVLDSDGSFFLYSKLTVDKS |
| | | | | | RWQQGNVFSCSVMHEALHNHYTQKSLSLSPGK |
| IgG1 | Increased FcRn | IgG1 | 27 | 232 | EPKSCDKTHTCPPCPAPELLGGPSVFLFPPKPKDTLMISR |
| (N297A/T307A/ | binding with No | | | | TPEVTCVVVDVSHEDPEVKFNWYVDGVEVHNAKTKPREEQ |
| E380A/N434A) | ADCC | | | | YASTYRVVSVLAVLHQDWLNGKEYKCKVSNKALPAPIEKT |
| | | | | | ISKAKGQPREPQVYTLPPSRDELTKNQVSLTCLVKGFYPS |
| | | | | | DIAVAWESNGQPENNYKTTPPVLDSDGSFFLYSKLTVDKS |
| | | | | | RWQQGNVFSCSVMHEALHAHYTQKSLSLSPGK |
| IgG1 | Increased FcRn | IgG1 | 28 | 232 | EPKSCDKTHTCPPCPAPEAAGGPSVFLFPPKPKDTLMISR |
| (L324A/L325A/ | binding with | | | | TPEVTCVVVDVSHEDPEVKFNWYVDGVEVHNAKTKPREEQ |
| T307A/E380A/ | LALA mutation | | | | YNSTYRVVSVLAVLHQDWLNGKEYKCKVSNKALPAPIEKT |
| N434A) | | | | | ISKAKGQPREPQVYTLPPSRDELTKNQVSLTCLVKGFYPS |
| | | | | | DIAVAWESNGQPENNYKTTPPVLDSDGSFFLYSKLTVDKS |
| | | | | | RWQQGNVFSCSVMHEALHAHYTQKSLSLSPGK |
| IgG2 (T250Q, | Increased FcRn | IgG2 | 29 | 228 | ERKCCVECPPCPAPPVAGPSVFLFPPKPKDQLMISRTPEV |
| M428L) | binding | | | | TCVVVDVSHEDPEVQFNWYVDGVEVHNAKTKPREEQFNST |
| | | | | | FRVVSVLTVVHQDWLNGKEYKCKVSNKGLPAPIEKTISKT |
| | | | | | KGQPREPQVYTLPPSREEMTKNQVSLTCLVKGFYPSDIAV |
| | | | | | EWESNGQPENNYKTTPPMLDSDGSFFLYSKLTVDKSRWQQ |
| | | | | | GNVFSCSVLHEALHNHYTQKSLSLSPGK |
| IgG2 WT | NA | IgG2 | 30 | 228 | ERKCCVECPPCPAPPVAGPSVFLFPPKPKDTLMISRTPEV |
| | | | | | TCVVVDVSHEDPEVQFNWYVDGVEVHNAKTKPREEQFNST |
| | | | | | FRVVSVLTVVHQDWLNGKEYKCKVSNKGLPAPIEKTISKT |
| | | | | | KGQPREPQVYTLPPSREEMTKNQVSLTCLVKGFYPSDIAV |
| | | | | | EWESNGQPENNYKTTPPMLDSDGSFFLYSKLTVDKSRWQQ |
| | | | | | GNVFSCSVMHEALHNHYTQKSLSLSPGK |
| IgG4 WT | NA | lgG4 | 31 | 229 | ESKYGPPCPSCPAPEFLGGPSVFLFPPKPKDTLMISRTPE |
| | | | | | VTCVVVDVSQEDPEVQFNWYVDGVEVHNAKTKPREEQFNS |
| | | | | | TYRVVSVLTVLHQDWLNGKEYKCKVSNKGLPSSIEKTISK |
| | | | | | AKGQPREPQVYTLPPSQEEMTKNQVSLTCLVKGFYPSDIA |
| | | | | | VEWESNGQPENNYKTTPPVLDSDGSFFLYSRLTVDKSRWQ |
| | | | | | EGNVFSCSVMHEALHNHYTQKSLSLSLGK |

“WT” means wild-type.
“ADCC” refers to Antibody-dependent cellular cytotoxicity (ADCC).
“NA” means not applicable.

[0182] Angiotensin Converting Enzyme 2 Neutralization of SARS-CoV-2

[0183] The angiotensin-converting enzyme (ACE)-related carboxypeptidase, ACE2, is a type I integral membrane protein of about 805 amino acids that contains one HEXXH+E zinc-binding consensus sequence. ACE2 is a close homolog of the somatic angiotensin-converting enzyme (ACE; EC 3.4.15.1), a peptidyl dipeptidase that plays an important role in the renin-angiotensin system. ACE2 sequence includes an N-terminal signal sequence (amino acids 1 to 18), a potential transmembrane domain (amino acids 740 to 763), and a potential metalloprotease zinc-binding site (amino acids 374 to 378, HEMGH).

[0184] A crystal structure of ACE2 bound to an S protein fragment containing the RBD (residues 306 to 527) was published. ACE2 residues that made direct contact with the RBD included Q24, T27, K31, H34, E37, D38, Y41, Q42, L45, L79, M82, Y83, N90, Q325, E329, N330, K353 and G354. The comparative structural analyses suggest that most ACE2 key residues involved in S-protein binding are found on the N-terminal back-to-back alpha-helices 1 and 2. To determine whether the two helices do in fact remain stable in complex with the S-protein.

[0185] In some embodiments of the invention, polypeptides comprising an ACE2 domain are disclosed. In some embodiments, the ACE2 domain is derived from a mammalian ACE2 sequence. In one embodiment, the ACE2 domain is the human ACE2 sequence (the full-length amino acid sequence, including the signal sequence, is provided in SEQ ID NO: 32), a derivative or fragment thereof that comprises amino acids 22-44 of SEQ ID NO: 32. For example, in one particular embodiment, the ACE2 domain comprises the ACE2 domain comprises the amino acid sequence selected from:

(SEQ ID NO: 34)
EEQAKTFLDKFNHEAEDLFYQSS
and
(SEQ ID NO: 35)
IEEQAKTFLDKFNHEAEDLFYQSSLASWNYNTNITEENVQNMNNAGDKWS
AFLKEQSTLAQMYPLQEI

In another embodiment, the ACE2 domain further comprises amino acids 351-357 of SEQ ID NO: 32. For example, in another embodiment, the ACE2 domain is selected from the group consisting of:

(SEQ ID NO: 36)
EEQAKTFLDKFNHEAEDLFYQSS(X)ₙLGKGDFR
and
(SEQ ID NO: 37)
IEEQAKTFLDKFNHEAEDLFYQSSLASWNYNTNITEENVQNMNNAGDKWS
AFLKEQSTLAQMYPLQEI(X)nWDLGKGDFR

wherein:
[0186] n=0-30
[0187] X=any amino acid selected from Gly, Ala, Ser, Ile, Leu and Val, or any combination thereof.

[0188] In certain embodiments, the ACE2 domain can be modified, for example, to contain amino acid substitutions to alter the affinity for virus particles. In one embodiment, the ACE2 domain comprises an amino acid substitution at a position selected from the group consisting of F28, D30, and L79 (amino acid numbering based on the full-length human ACE2 sequence). In one embodiment, the ACE2 domain comprises an F28W substitution. In another embodiment, the ACE2 domain comprises a D30A substitution. In still another embodiment, the ACE2 domain comprises a L79T substitution. Non-limiting examples of the various ACE2 domains include, but are not limited to: ACE2-1, ACE2-2, ACE2-3, ACE2-4, ACE2-5, and ACE2-6. The ACE2-1 domain includes an α-helix 1+β-sheet)-(G4S)*2-(α-helix 1+β-sheet. The ACE2-2 domain includes an α-helix 1+α-helix 2+β-sheet)-(G4S)*2-(α-helix 1+α-helix 2+β-sheet. The ACE2-3 includes ACE2-1 with F28W. The ACE2-4 includes ACE2-2 with F28W. The ACE2-5 includes ACE2-2 with D30A. The ACE2-6 includes ACE2-2 with L79T.

[0189] In order to induce decoy proteins specifically binding to spike proteins, sequences of angiotensin-converting enzyme 2 (ACE2), neuropilin-1 (NRP-1) and neuropilin-2 (NRP-2) were analyzed. Representatively, the whole sequences of angiotensin-converting enzyme 2, neuropilin-1 and neuropilin-2 were selected from the PubMed Entrez Protein Database.

[0190] Table 3 provides several exemplary ACE2 domains used in the therapeutic polypeptides described herein.

TABLE 3
ACE2 Domains (SEQ ID NOs: 32-45). Here, “(X)ₙ” means X
can be any amino acid selected from Gly, Ala, Ser, Ile,
Leu and Val, or any combination thereof; and n = 0-30.

| | Multimer, | | | |
|---|---|---|---|---|
| | F28W, D30A, | | | |
| | or L79T | | | |
| | Mutant | SEQ ID | | |
| Name | Content | NO: | Length | Sequence |
| Full length | None | 32 | 555 | MSSSSWLLLSLVAVTAAQSTIEEQAKTFLDK |
| ACE2 | | | | FNHEAEDLFYQSSLASWNYNTNITEENVQNM |
| | | | | NNAGDKWSAFLKEQSTLAQMYPLQEIQNLTV |
| | | | | KLQLQALQQNGSSVLSEDKSKRLNTILNTMS |
| | | | | TIYSTGKVCNPDNPQECLLLEPGLNEIMANS |
| | | | | LDYNERLWAWESWRSEVGKQLRPLYEEYVVL |
| | | | | KNEMARANHYEDYGDYWRGDYEVNGVDGYDY |
| | | | | SRGQLIEDVEHTFEEIKPLYEHLHAYVRAKL |
| | | | | MNAYPSYISPIGCLPAHLLGDMWGRFWTNLY |
| | | | | SLTVPFGQKPNIDVTDAMVDQAWDAQRIFKE |
| | | | | AEKFFVSVGLPNMTQGFWENSMLTDPGNVQK |
| | | | | AVCHPTAWDLGKGDFRILMCTKVTMDDFLTA |
| | | | | HHEMGHIQYDMAYAAQPFLLRNGANEGFHEA |
| | | | | VGEIMSLSAATPKHLKSIGLLSPDFQEDNET |
| | | | | EINFLLKQALTIVGTLPFTYMLEKWRWMVFK |
| | | | | GEIPKDQWMKKWWEMKREIVGVVEPVPHDET |
| | | | | YCDPASLFHVSDDYSFIRYYTRTLYQFQFQE |
| | | | | ALCQAAKHEGPLHKCDISNSTEAGQKLL |
| Soluble | None | 33 | 598 | QSTIEEQAKTFLDKFNHEAEDLFYQSSLASW |
| ACE-2 | | | | NYNTNITEENVQNMNNAGDKWSAFLKEQSTL |
| | | | | AQMYPLQEIQNLTVKLQLQALQQNGSSVLSE |
| | | | | DKSKRLNTILNTMSTIYSTGKVCNPDNPQEC |
| | | | | LLLEPGLNEIMANSLDYNERLWAWESWRSEV |
| | | | | GKQLRPLYEEYVVLKNEMARANHYEDYGDYW |
| | | | | RGDYEVNGVDGYDYSRGQLIEDVEHTFEEIK |
| | | | | PLYEHLHAYVRAKLMNAYPSYISPIGCLPAH |
| | | | | LLGDMWGRFWTNLYSLTVPFGQKPNIDVTDA |
| | | | | MVDQAWDAQRIFKEAEKFFVSVGLPNMTQGF |
| | | | | WENSMLTDPGNVQKAVCHPTAWDLGKGDFRI |
| | | | | LMCTKVTMDDFLTAHHEMGHIQYDMAYAAQP |
| | | | | FLLRNGANEGFHEAVGEIMSLSAATPKHLKS |
| | | | | IGLLSPDFQEDNETEINFLLKQALTIVGTLP |
| | | | | FTYMLEKWRWMVFKGEIPKDQWMKKWWEMKR |
| | | | | EIVGVVEPVPHDETYCDPASLFHVSNDYSFI |
| | | | | RYYTRTLYQFQFQEALCQAAKHEGPLHKCDI |
| | | | | SNSTEAGQKLFNMLRLGKSEPWTLALENVVG |
| | | | | AKNMNVRPLLNYFEPLFTWLKDQNKNSFVGW |
| | | | | STDWSPYAD |
| Monomeric | | 34 | 23 | EEQAKTFLDKFNHEAEDLFYQSS |
| ACE2-1 | | | | |
| minimal | | | | |
| Monomeric | | 35 | 68 | IEEQAKTFLDKFNHEAEDLFYQSSLASWNYN |
| ACE2-1 | | | | TNITEENVQNMNNAGDKWSAFLKEQSTLAQM |
| minimal | | | | YPLQEI |
| Monomeric | | 36 | 31 | EEQAKTFLDKFNHEAEDLFYQSS(X)ₙLGKG |
| ACE2-1 | | | | DFR |
| Motif | | | | |
| Monomeric | | 37 | 78 | IEEQAKTFLDKFNHEAEDLFYQSSLASWNYN |
| ACE2-1 | | | | TNITEENVQNMNNAGDKWSAFLKEQSTLAQM |
| Motif | | | | YPLQEI(X)ₙWDLGKGDFR |
| Monomeric | | 38 | 31 | EEQAKTFLDKFNHEAEDLFYQSSGLGKGDFR |
| ACE2-1 | | | | |
| Monomeric | | 39 | 77 | IEEQAKTFLDKFNHEAEDLFYQSSLASWNYN |
| ACE2-2 | | | | TNITEENVQNMNNAGDKWSAFLKEQSTLAQM |
| | | | | YPLQEIWDLGKGDFR |
| ACE2-1 | Dimer of SEQ | 40 | 72 | EEQAKTFLDKFNHEAEDLFYQSSGLGKGDFR |
| | ID NO: 36 | | | GGGGSGGGGSEEQAKTFLDKFNHEAEDLFYQ |
| | | | | SSGLGKGDFR |
| ACE2-2 | Dimer of SEQ | | 164 | IEEQAKTFLDKFNHEAEDLFYQSSLASWNYN |
| | ID NO: 37 | | | TNITEENVQNMNNAGDKWSAFLKEQSTLAQM |
| | | | | YPLQEIWDLGKGDFRGGGGSGGGGSIEEQAK |
| | | | | TFLDKFNHEAEDLFYQSSLASWNYNTNITEE |
| | | | | NVQNMNNAGDKWSAFLKEQSTLAQMYPLQEI |
| | | | | WDLGKGDFR |
| ACE2-3 | SEQ ID NO:38 | 42 | 72 | EEQAKTWLDKFNHEAEDLFYQSSGLGKGDFR |
| | with F28W | | | GGGGSGGGGSEEQAKTWLDKFNHEAEDLFYQ |
| | Substitution | | | SSGLGKGDFR |
| ACE2-4 | SEQ ID NO: | 43 | 164 | IEEQAKTWLDKFNHEAEDLFYQSSLASWNYN |
| | 39 with F28W | | | TNITEENVQNMNNAGDKWSAFLKEQSTLAQM |
| | Substitution | | | YPLQEIWDLGKGDFRGGGGSGGGGSIEEQAK |
| | | | | TWLDKFNHEAEDLFYQSSLASWNYNTNITEE |
| | | | | NVQNMNNAGDKWSAFLKEQSTLAQMYPLQEI |
| | | | | WDLGKGDFR |
| ACE2-5 | SEQ ID NO: | 44 | 164 | IEEQAKTFLAKFNHEAEDLFYQSSLASWNYN |
| | 39 with D30A | | | TNITEENVQNMNNAGDKWSAFLKEQSTLAQM |
| | Substitution | | | YPLQEIWDLGKGDFRGGGGSGGGGSIEEQAK |
| | | | | TFLAKFNHEAEDLFYQSSLASWNYNTNITEE |
| | | | | NVQNMNNAGDKWSAFLKEQSTLAQMYPLQEI |
| | | | | WDLGKGDFR |
| ACE2-6 | SEQ ID NO: | 45 | 164 | IEEQAKTFLDKFNHEAEDLFYQSSLASWNYN |
| | 39 with L79T | | | TNITEENVQNMNNAGDKWSAFLKEQSTTAQM |
| | Substitution | | | YPLQEIWDLGKGDFRGGGGSGGGGSIEEQAK |
| | | | | TFLDKFNHEAEDLFYQSSLASWNYNTNITEE |
| | | | | NVQNMNNAGDKWSAFLKEQSTTAQMYPLQEI |
| | | | | WDLGKGDFR |

[0191] Linker Portions

[0192] The peptide binding specifically to NRP1 of an aspect of the present disclosure may further comprise a linker peptide. The linker peptide may comprise or consist of 1 to 50 amino acids, 4 to 20 amino acids, or 4 to 10 amino acids. In addition, the linker peptide may comprise or consist of glycine or serine, and may comprise or consist of an amino acid sequence of (GGGGS)n (wherein n is each independently an integer between 1 and 20), or may comprise or consist of an amino acid sequence of (GGGGS)₂.

[0193] In some embodiments of the present disclosure, the peptide having the linker peptide bound thereto may comprise the amino acid sequence of any one of SEQ ID NOs: 46 to 52 as provided below in Table 4.

TABLE 4
Linker Domains (SEQ ID NOs: 46-52).

| SEQ ID | | | |
|---|---|---|---|
| NO: | NAME | LENGTH | SEQUENCE |
| 46 | (G4S)2 | 10 | GGGGSGGGGS |
| | Linker | | |
| 47 | NRP1 B1 | 6 | KITDYP |
| | linker | | |
| 48 | NRP2 B1 | 6 | RVTDAP |
| | linker | | |
| 49 | NRP1 B1 | 4 | EDFK |
| | linker | | |
| 50 | NRP2 B1 | 4 | ENFQ |
| | linker | | |
| 51 | (G4A)2 | 10 | GGGGAGGGGA |
| | Linker | | |
| 52 | (GA)5 | 10 | GAGAGAGAGA |
| | Linker | | |

[0194] Signal Sequence

[0195] Signal sequences can be located on the N-terminus of peptides and can enable those proteins to find their correct location outside the cell membrane. The signal sequence can tag the protein for transport through the cell membrane to be removed from the cell. Signal peptides can function to prompt a cell to translocate the protein, usually to the cellular membrane. In prokaryotes, signal peptides can direct the newly synthesized protein to the SecYEG protein-conducting channel, which is present in the plasma membrane.

[0196] In some embodiments of the present disclosure, the signal sequence may comprise the amino acid sequence of SEQ ID NO: 53 as provided below in Table 5.

TABLE 5
Signal Sequence Domain (SEQ ID NO: 53).

| SEQ ID NO: | LENGTH | SEQUENCE |
|---|---|---|
| 53 | 19 | MGWSCIILFLVATATGVHS |

[0197] Immunoglobulin-ACE2 Constructs

[0198] In one aspect of the current invention, a polypeptide may comprise an ACE2 domain, or a derivative or a fragment thereof, of an angiotensin converting enzyme 2; and an immunoglobulin domain. The ACE2 domain of these polypeptides is capable of binding to a coat protein of a virus selected from the group consisting of herpesviridae, papillomaviridae, coronaviridae, flaviviridae, togaviridae, bornaviridae, bunyaviridae, filoviridae, orthomyxoviridae, paramyxoviridae, pneumoviridae, and retroviridae. Table 6 provides a list of exemplary, but not limited to, immunoglobulin-ACE2 constructs.

TABLE 6
Immunoglobulin-ACE2 constructs (SEQ ID NOs: 54-56).

| Construct | | SEQ ID | | |
|---|---|---|---|---|
| No. | IgG Subtype | NO: | Length | Sequence |
| 1 | IgG1 Wt Fc - | 54 | 831 | TCPPCPAPELLGGPSVFLFPPKPKDTLMISRTP |
| | (G4S)₂-Full | | | EVTCVVVDVSHEDPEVKFNWYVDGVEVHNAKTK |
| | length ACE2 | | | PREEQYNSTYRVVSVLTVLHQDWLNGKEYKCKV |
| | | | | SNKALPAPIEKTISKAKGQPREPQVYTLPPSRD |
| | | | | ELTKNQVSLTCLVKGFYPSDIAVEWESNGQPEN |
| | | | | NYKTTPPVLDSDGSFFLYSKLTVDKSRWQQGNV |
| | | | | FSCSVMHEALHNHYTQKSLSLSPGKGGGGSGGG |
| | | | | GSQSTIEEQAKTFLDKFNHEAEDLFYQSSLASW |
| | | | | NYNTNITEENVQNMNNAGDKWSAFLKEQSTLAQ |
| | | | | MYPLQEIQNLTVKLQLQALQQNGSSVLSEDKSK |
| | | | | RLNTILNTMSTIYSTGKVCNPDNPQECLLLEPG |
| | | | | LNEIMANSLDYNERLWAWESWRSEVGKQLRPLY |
| | | | | EEYVVLKNEMARANHYEDYGDYWRGDYEVNGVD |
| | | | | GYDYSRGQLIEDVEHTFEEIKPLYEHLHAYVRA |
| | | | | KLMNAYPSYISPIGCLPAHLLGDMWGRFWTNLY |
| | | | | SLTVPFGQKPNIDVTDAMVDQAWDAQRIFKEAE |
| | | | | KFFVSVGLPNMTQGFWENSMLTDPGNVQKAVCH |
| | | | | PTAWDLGKGDFRILMCTKVTMDDFLTAHHEMGH |
| | | | | IQYDMAYAAQPFLLRNGANEGFHEAVGEIMSLS |
| | | | | AATPKHLKSIGLLSPDFQEDNETEINFLLKQAL |
| | | | | TIVGTLPFTYMLEKWRWMVFKGEIPKDQWMKKW |
| | | | | WEMKREIVGVVEPVPHDETYCDPASLFHVSNDY |
| | | | | SFIRYYTRTLYQFQFQEALCQAAKHEGPLHKCD |
| | | | | ISNSTEAGQKLFNMLRLGKSEPWTLALENVVGA |
| | | | | KNMNVRPLLNYFEPLFTWLKDQNKNSFVGWSTD |
| | | | | WSPYAD |
| 2 | IgG1 Wt Fc - | 55 | 305 | TCPPCPAPELLGGPSVFLFPPKPKDTLMISRTP |
| | (G4S)₂-Ace2- | | | EVTCVVVDVSHEDPEVKFNWYVDGVEVHNAKTK |
| | 1 | | | PREEQYNSTYRVVSVLTVLHQDWLNGKEYKCKV |
| | | | | SNKALPAPIEKTISKAKGQPREPQVYTLPPSRD |
| | | | | ELTKNQVSLTCLVKGFYPSDIAVEWESNGQPEN |
| | | | | NYKTTPPVLDSDGSFFLYSKLTVDKSRWQQGNV |
| | | | | FSCSVMHEALHNHYTQKSLSLSPGKGGGGSGGG |
| | | | | GSEEQAKTFLDKFNHEAEDLFYQSSGLGKGDFR |
| | | | | GGGGSGGGGSEEQAKTFLDKFNHEAEDLFYQSS |
| | | | | GLGKGDFR |
| 3 | IgG1 Wt Fc - | 56 | 397 | TCPPCPAPELLGGPSVFLFPPKPKDTLMISRTP |
| | (G4S)₂-Ace2- | | | EVTCVVVDVSHEDPEVKFNWYVDGVEVHNAKTK |
| | 1 | | | PREEQYNSTYRVVSVLTVLHQDWLNGKEYKCKV |
| | | | | SNKALPAPIEKTISKAKGQPREPQVYTLPPSRD |
| | | | | ELTKNQVSLTCLVKGFYPSDIAVEWESNGQPEN |
| | | | | NYKTTPPVLDSDGSFFLYSKLTVDKSRWQQGNV |
| | | | | FSCSVMHEALHNHYTQKSLSLSPGKGGGGSGGG |
| | | | | GSIEEQAKTFLDKFNHEAEDLFYQSSLASWNYN |
| | | | | TNITEENVONMNNAGDKWSAFLKEQSTLAQMYP |
| | | | | LQEIWDLGKGDFRGGGGSGGGGSIEEQAKTFLD |
| | | | | KFNHEAEDLFYQSSLASWNYNTNITEENVQNMN |
| | | | | NAGDKWSAFLKEQSTLAQMYPLQEIWDLGKGDF |
| | | | | R |

[0199] Immunoglobulin-Neuropilin Constructs

[0200] In another aspect of the current invention, a polypeptide may comprise a b1 domain, or a derivative or fragment thereof, of a neuropilin; and an immunoglobulin domain. The b1 domain of these polypeptides is capable of binding to a coat protein of a virus selected from the group consisting of herpesviridae, papillomaviridae, coronaviridae, flaviviridae, togaviridae, bornaviridae, bunyaviridae, filoviridae, orthomyxoviridae, paramyxoviridae, pneumoviridae, and retroviridae. In some embodiments, the b1 domain may include the full-length NRP1 or NRP2 peptide. In other embodiments, the b1 domain, or derivative or fragment thereof, further comprises one or more additional b1 domains, or derivative or fragment thereof; one or more b2 domains, or derivative or fragment thereof, of neuropilin, or a combination thereof. Referring to FIG. 4, a variety of exemplary schematic designs are provided for these polypeptides where the b1 domain, or a derivative or fragment thereof, is coupled to an immunoglobulin domain. Table 7A outlines the general structure and connectivity of several exemplary constructs, but not intended to be limited to, neuropilin-immunoglobulin constructs (Construct Nos. 12-36) or polypeptides including b1, linker, and immunoglobulin domains. In some embodiments, the polypeptide has a configuration selected from the group of Construct Nos. 12-36. Table 7B provides a list of these same exemplary constructs or neuropilin-immunoglobulin polypeptides including b1, linker, and immunoglobulin domains and their corresponding peptide sequences.

TABLE 7A
Immunoglobulin-Neuropilin constructs.

| Construct | | | | | C-term | | NRP | IgG |
|---|---|---|---|---|---|---|---|---|
| No. | N-term (NRP1) | Linker | Stem | Linker4 | (ACE2) | Note | type | Subtype |
| 12 | b1 | (G4S)2 | IgG1 Fc | — | — | | NRP1 | IgG1 |
| 13 | (b1b2) | (G4S)2 | | — | | | NRP1 | IgG1 |
| 14 | (b1b1)-(G4S)2-(b1b1) | (G4S)2 | | — | | | NRP1 | IgG1 |
| 15 | (b1b2)-(G4S)2-(b1b2) | (G4S)2 | | — | | | NRP1 | IgG1 |
| 16 | (b1b2)-(G4S)2-(b1b2) | (G4S)2 | | — | — | b1(E319A) | NRP1 | IgG1 |
| 17 | (b1b2) | (G4S)2 | | (G4S)2 | (b1b2) | b1(E319A) | NRP1 | IgG1 |
| 18 | (b1b2)-(G4S)2-(b1b2) | (G4S)2 | | (G4S)2 | (b1b2) | b1(E319A) | NRP1 | IgG1 |
| 19 | (b1b2)-(G4S)2-(b1b2) | (G4S)2 | | — | — | b1b2 of NRP2 | NRP2 | IgG1 |
| 20 | (b1b2)-(G4S)2-(b1b2) | (G4S)2 | | — | — | b1(E319A)-No ADCC | NRP1 | IgG1 |
| 21 | (b1b2) | (G4S)2 | | (G4S)2 | (b1b2) | b1(E319A)-No ADCC | NRP1 | IgG1 |
| 22 | (b1b2)-(G4S)2-(b1b2) | (G4S)2 | IgG1 Fc | — | — | WT Fc | NRP1 | IgG1 |
| 23 | (b1b2)-(G4S)2-(b1b2) | (G4S)2 | | — | — | b1(Y297A, S346A, Y353A)- | NRP1 | IgG1 |
| | | | | | | No binding to VEGF165A | | |
| 24 | (b1b2)-(G4S)2-(b1b2) | (G4S)2 | | — | — | No ADCC | NRP1 | IgG1 |
| 25 | (b1b2)-(G4S)2-(b1b2) | (G4S)2 | | — | — | LALA mutation | NRP1 | IgG1 |
| 26 | (b1b2)-(G4S)2-(b1b2) | (G4S)2 | | — | — | b1(E319A) | NRP1 | IgG1 |
| 27 | (b1b2)-(G4S)2-(b1b2) | (G4S)2 | | — | — | b1(E319A)-No ADCC | NRP1 | IgG1 |
| 28 | (b1b2) | (G4S)2 | | (G4S)2 | (b1b2) | | NRP1 | IgG1 |
| 29 | (b1b2)-(G4S)2-(b1b2) | (G4S)2 | | — | — | b1(K351A)-No ADCC | NRP1 | IgG1 |
| 30 | (b1b2)-(G4S)2-(b1b2) | (G4S)2 | | — | — | b1(K351A)-LALA | NRP1 | IgG1 |
| | | | | | | mutation | | |
| 31 | (b1b2)-(G4S)2-(b1b2) | (G4S)2 | | — | — | No ADCC | NRP1 | IgG1 |
| 32 | (b1b2)-(G4S)2-(b1b2) | (G4S)2 | | — | — | LALA mutation | NRP1 | IgG1 |
| 33 | (b1b2)-(G4S)2-(b1b2) | (G4S)2 | | — | — | b1(E319A)-LALA | NRP1 | IgG1 |
| | | | | | | mutation | | |
| 34 | (b1b2) | (G4S)2 | | (G4S)2 | (b1b2) | b1(E319A)-LALA | NRP1 | IgG1 |
| | | | | | | mutation | | |
| 35 | (b1b2)-(G4S)2-(b1b2) | (G4S)2 | IgG2 Fc | — | — | | NRP1 | IgG2 |
| 36 | (b1b2) | (G4S)2 | IgG2 Fc | (G4S)2 | (b1b2) | | NRP1 | IgG2 |

“ADCC” refers to Antibody-dependent cellular cytotoxicity (ADCC).
“NA” means not applicable.

TABLE 7B
Immunoglobulin-Neuropilin constructs (SEQ ID NOs: 65-89).

| Con- | SEQ | | |
|---|---|---|---|
| struct | ID | | |
| No. | NO: | Length | Sequence |
| 12 | 65 | 392 | CMEALGMESGEIHSDQITASSQYSTNWSAERSRLNYPENGWTPGEDSYREWIQVDLGLLRFVTAVGTQGAISKETKKKYYVK |
| | | | TYKIDVSSNGEDWITIKEGNKPVLFQGNTNPTDVVVAVFPKPLITRFVRIKPATWETGISMRFEVYGCGGGGSGGGGSEPKS |
| | | | CDKTHTCPPCPAPELLGGPSVFLFPPKPKDTLMISRTPEVTCVVVDVSHEDPEVKFNWYVDGVEVHNAKTKPREEQYNSTYR |
| | | | VVSVLAVLHQDWLNGKEYKCKVSNKALPAPIEKTISKAKGQPREPQVYTLPPSRDELTKNQVSLTCLVKGFYPSDIAVAWES |
| | | | NGQPENNYKTTPPVLDSDGSFFLYSKLTVDKSRWQQGNVFSCSVMHEALHAHYTQKSLSLSPGK |
| 13 | 66 | 551 | CMEALGMESGEIHSDQITASSQYSTNWSAERSRLNYPENGWTPGEDSYREWIQVDLGLLRFVTAVGTQGAISKETKKKYYVK |
| | | | TYKIDVSSNGEDWITIKEGNKPVLFQGNTNPTDVVVAVFPKPLITRFVRIKPATWETGISMRFEVYGCKITDYPCSGMLGMV |
| | | | SGLISDSQITSSNQGDRNWMPENIRLVTSRSGWALPPAPHSYINEWLQIDLGEEKIVRGIIIQGGKHRENKVFMRKFKIGYS |
| | | | NNGSDWKMIMDDSKRKAKSFEGNNNYDTPELRTFPALSTRFIRIYPERATHGGLGLRMELLGCGGGGSGGGGSEPKSCDKTH |
| | | | TCPPCPAPELLGGPSVFLFPPKPKDTLMISRTPEVTCVVVDVSHEDPEVKFNWYVDGVEVHNAKTKPREEQYNSTYRVVSVL |
| | | | AVLHQDWLNGKEYKCKVSNKALPAPIEKTISKAKGQPREPQVYTLPPSRDELTKNQVSLTCLVKGFYPSDIAVAWESNGQPE |
| | | | NNYKTTPPVLDSDGSFFLYSKLTVDKSRWQQGNVFSCSVMHEALHAHYTQKSLSLSPGK |
| 14 | 67 | 864 | CMEALGMESGEIHSDQITASSQYSTNWSAERSRLNYPENGWTPGEDSYREWIQVDLGLLRFVTAVGTQGAISKETKKKYYVK |
| | | | TYKIDVSSNGEDWITIKEGNKPVLFQGNTNPTDVVVAVFPKPLITRFVRIKPATWETGISMRFEVYGCKITDYPCMEALGME |
| | | | SGEIHSDOITASSQYSTNWSAERSRLNYPENGWTPGEDSYREWIQVDLGLLRFVTAVGTQGAISKETKKKYYVKTYKIDVSS |
| | | | HSDQITASSQYSTNWSAERSRLNYPENGWTPGEDSYREWIQVDLGLLRFVTAVGTQGAISKETKKKYYVKTYKIDVSSNGED |
| | | | WITIKEGNKPVLFQGNTNPTDVVVAVFPKPLITRFVRIKPATWETGISMRFEVYGCKITDYPCMEALGMESGEIHSDQITAS |
| | | | SQYSTNWSAERSRLNYPENGWTPGEDSYREWIQVDLGLLRFVTAVGTQGAISKETKKKYYVKTYKIDVSSNGEDWITIKEGN |
| | | | KPVLFQGNTNPTDVVVAVFPKPLITRFVRIKPATWETGISMRFEVYGCGGGGSGGGGSEPKSCDKTHTCPPCPAPELLGGPS |
| | | | VFLFPPKPKDTLMISRTPEVTCVVVDVSHEDPEVKFNWYVDGVEVHNAKTKPREEQYNSTYRVVSVLAVLHQDWLNGKEYKC |
| | | | KVSNKALPAPIEKTISKAKGQPREPQVYTLPPSRDELTKNQVSLTCLVKGFYPSDIAVAWESNGQPENNYKTTPPVLDSDGS |
| | | | FFLYSKLTVDKSRWQQGNVFSCSVMHEALHAHYTQKSLSLSPGK |
| 15 | 68 | 870 | CMEALGMESGEIHSDOITASSQYSTNWSAERSRLNYPENGWTPGEDSYREWIQVDLGLLRFVTAVGTQGAISKETKKKYYVK |
| | | | TYKIDVSSNGEDWITIKEGNKPVLFQGNTNPTDVVVAVFPKPLITRFVRIKPATWETGISMRFEVYGCKITDYPCSGMLGMV |
| | | | SGLISDSQITSSNQGDRNWMPENIRLVTSRSGWALPPAPHSYINEWLQIDLGEEKIVRGIIIQGGKHRENKVFMRKFKIGYS |
| | | | NNGSDWKMIMDDSKRKAKSFEGNNNYDTPELRTFPALSTRFIRIYPERATHGGLGLRMELLGCGGGGSGGGGSCMEALGMES |
| | | | GEIHSDQITASSQYSTNWSAERSRLNYPENGWTPGEDSYREWIQVDLGLLRFVTAVGTQGAISKETKKKYYVKTYKIDVSSN |
| | | | TSSNQGDRNWMPENIRLVTSRSGWALPPAPHSYINEWLQIDLGEEKIVRGIIIQGGKHRENKVFMRKFKIGYSNNGSDWKMI |
| | | | MDDSKRKAKSFEGNNNYDTPELRTFPALSTRFIRIYPERATHGGLGLRMELLGCGGGGSGGGGSEPKSCDKTHTCPPCPAPE |
| | | | LLGGPSVFLFPPKPKDTLMISRTPEVTCVVVDVSHEDPEVKFNWYVDGVEVHNAKTKPREEQYNSTYRVVSVLAVLHQDWLN |
| | | | GKEYKCKVSNKALPAPIEKTISKAKGQPREPQVYTLPPSRDELTKNQVSLTCLVKGFYPSDIAVAWESNGQPENNYKTTPPV |
| | | | LDSDGSFFLYSKLTVDKSRWQQGNVFSCSVMHEALHAHYTQKSLSLSPGK |
| 16 | 69 | 870 | CMEALGMESGEIHSDQITASSQYSTNWSAERSRLNYPENGWTPGADSYREWIQVDLGLLRFVTAVGTQGAISKETKKKYYVK |
| | | | TYKIDVSSNGEDWITIKEGNKPVLFQGNTNPTDVVVAVFPKPLITRFVRIKPATWETGISMRFEVYGCKITDYPCSGMLGMV |
| | | | SGLISDSQITSSNQGDRNWMPENIRLVTSRSGWALPPAPHSYINEWLQIDLGEEKIVRGIIIQGGKHRENKVFMRKFKIGYS |
| | | | NNGSDWKMIMDDSKRKAKSFEGNNNYDTPELRTFPALSTRFIRIYPERATHGGLGLRMELLGCGGGGSGGGGSCMEALGMES |
| | | | GEIHSDQITASSQYSTNWSAERSRLNYPENGWTPGADSYREWIQVDLGLLRFVTAVGTQGAISKETKKKYYVKTYKIDVSSN |
| | | | TSSNQGDRNWMPENIRLVTSRSGWALPPAPHSYINEWLQIDLGEEKIVRGIIIQGGKHRENKVFMRKFKIGYSNNGSDWKMI |
| | | | MDDSKRKAKSFEGNNNYDTPELRTFPALSTRFIRIYPERATHGGLGLRMELLGCGGGGSGGGGSEPKSCDKTHTCPPCPAPE |
| | | | LLGGPSVFLFPPKPKDTLMISRTPEVTCVVVDVSHEDPEVKFNWYVDGVEVHNAKTKPREEQYNSTYRVVSVLAVLHQDWLN |
| | | | GKEYKCKVSNKALPAPIEKTISKAKGQPREPQVYTLPPSRDELTKNQVSLTCLVKGFYPSDIAVAWESNGQPENNYKTTPPV |
| | | | LDSDGSFFLYSKLTVDKSRWQQGNVFSCSVMHEALHAHYTQKSLSLSPGK |
| 17 | 70 | 874 | CMEALGMESGEIHSDQITASSQYSTNWSAERSRLNYPENGWTPGADSYREWIQVDLGLLRFVTAVGTQGAISKETKKKYYVK |
| | | | TYKIDVSSNGEDWITIKEGNKPVLFQGNTNPTDVVVAVFPKPLITRFVRIKPATWETGISMRFEVYGCKITDYPCSGMLGMV |
| | | | SGLISDSQITSSNQGDRNWMPENIRLVTSRSGWALPPAPHSYINEWLQIDLGEEKIVRGIIIQGGKHRENKVFMRKFKIGYS |
| | | | NNGSDWKMIMDDSKRKAKSFEGNNNYDTPELRTFPALSTRFIRIYPERATHGGLGLRMELLGCGGGGSGGGGSEPKSCDKTH |
| | | | TCPPCPAPELLGGPSVFLFPPKPKDTLMISRTPEVTCVVVDVSHEDPEVKFNWYVDGVEVHNAKTKPREEQYNSTYRVVSVL |
| | | | AVLHQDWLNGKEYKCKVSNKALPAPIEKTISKAKGQPREPQVYTLPPSRDELTKNQVSLTCLVKGFYPSDIAVAWESNGQPE |
| | | | NNYKTTPPVLDSDGSFFLYSKLTVDKSRWQQGNVFSCSVMHEALHAHYTQKSLSLSPGKGGGGSGGGGSCMEALGMESGEIH |
| | | | SDQITASSQYSTNWSAERSRLNYPENGWTPGADSYREWIQVDLGLLRFVTAVGTQGAISKETKKKYYVKTYKIDVSSNGEDW |
| | | | ITIKEGNKPVLFQGNTNPTDVVVAVFPKPLITRFVRIKPATWETGISMRFEVYGCKITDYPCSGMLGMVSGLISDSQITSSN |
| | | | QGDRNWMPENIRLVTSRSGWALPPAPHSYINEWLQIDLGEEKIVRGIIIQGGKHRENKVFMRKFKIGYSNNGSDWKMIMDDS |
| | | | KRKAKSFEGNNNYDTPELRTFPALSTRFIRIYPERATHGGLGLRMELLGCEVEA |
| 18 | 71 | 1193 | CMEALGMESGEIHSDQITASSQYSTNWSAERSRLNYPENGWTPGADSYREWIQVDLGLLRFVTAVGTQGAISKETKKKYYVK |
| | | | TYKIDVSSNGEDWITIKEGNKPVLFQGNTNPTDVVVAVFPKPLITRFVRIKPATWETGISMRFEVYGCKITDYPCSGMLGMV |
| | | | SGLISDSQITSSNQGDRNWMPENIRLVTSRSGWALPPAPHSYINEWLQIDLGEEKIVRGIIIQGGKHRENKVFMRKFKIGYS |
| | | | NNGSDWKMIMDDSKRKAKSFEGNNNYDTPELRTFPALSTRFIRIYPERATHGGLGLRMELLGCGGGGSGGGGSCMEALGMES |
| | | | GEIHSDQITASSQYSTNWSAERSRLNYPENGWTPGADSYREWIQVDLGLLRFVTAVGTQGAISKETKKKYYVKTYKIDVSSN |
| | | | GEDWITIKEGNKPVLFQGNTNPTDVVVAVFPKPLITRFVRIKPATWETGISMRFEVYGCKITDYPCSGMLGMVSGLISDSQI |
| | | | TSSNQGDRNWMPENIRLVTSRSGWALPPAPHSYINEWLQIDLGEEKIVRGIIIQGGKHRENKVFMRKFKIGYSNNGSDWKMI |
| | | | MDDSKRKAKSFEGNNNYDTPELRTFPALSTRFIRIYPERATHGGLGLRMELLGCGGGGSGGGGSEPKSCDKTHTCPPCPAPE |
| | | | LLGGPSVFLFPPKPKDTLMISRTPEVTCVVVDVSHEDPEVKFNWYVDGVEVHNAKTKPREEQYNSTYRVVSVLAVLHQDWLN |
| | | | GKEYKCKVSNKALPAPIEKTISKAKGQPREPQVYTLPPSRDELTKNQVSLTCLVKGFYPSDIAVAWESNGQPENNYKTTPPV |
| | | | LDSDGSFFLYSKLTVDKSRWQQGNVFSCSVMHEALHAHYTQKSLSLSPGKGGGGSGGGGSCMEALGMESGEIHSDQITASSQ |
| | | | VLFQGNTNPTDVVVAVFPKPLITRFVRIKPATWETGISMRFEVYGCKITDYPCSGMLGMVSGLISDSQITSSNQGDRNWMPE |
| | | | NIRLVTSRSGWALPPAPHSYINEWLQIDLGEEKIVRGIIIQGGKHRENKVFMRKFKIGYSNNGSDWKMIMDDSKRKAKSFEG |
| | | | NNNYDTPELRTFPALSTRFIRIYPERATHGGLGLRMELLGCEVEA |
| 19 | 72 | 884 | CNVPLGMESGRIANEQISASSTYSDGRWTPQQSRLHGDDNGWTPNLDSNKEYLQVDLRFLTMLTAIATQGAISRETQNGYYV |
| | | | KSYKLEVSTNGEDWMVYRHGKNHKVFQANNDATEVVLNKLHAPLLTRFVRIRPQTWHSGIALRLELFGCRVTDAPCSNMLGM |
| | | | LSGLIADSQISASSTQEYLWSPSAARLVSSRSGWFPRIPQAQPGEEWLQVDLGTPKTVKGVIIQGARGGDSITAVEARAFVR |
| | | | KFKVSYSLNGKDWEYIQDPRTQQPKLFEGNMHYDTPDIRRFDPIPAQYVRVYPERWSPAGIGMRLEVLGCGGGGSGGGGSCN |
| | | | VPLGMESGRIANEQISASSTYSDGRWTPQQSRLHGDDNGWTPNLDSNKEYLQVDLRFLTMLTAIATQGAISRETQNGYYVKS |
| | | | YKLEVSTNGEDWMVYRHGKNHKVFQANNDATEVVLNKLHAPLLTRFVRIRPQTWHSGIALRLELFGCRVTDAPCSNMLGMLS |
| | | | GLIADSQISASSTQEYLWSPSAARLVSSRSGWFPRIPQAQPGEEWLQVDLGTPKTVKGVIIQGARGGDSITAVEARAFVRKF |
| | | | KVSYSLNGKDWEYIQDPRTQQPKLFEGNMHYDTPDIRRFDPIPAQYVRVYPERWSPAGIGMRLEVLGCGGGGSGGGGSEPKS |
| | | | CDKTHTCPPCPAPELLGGPSVFLFPPKPKDTLMISRTPEVTCVVVDVSHEDPEVKFNWYVDGVEVHNAKTKPREEQYNSTYR |
| | | | VVSVLAVLHQDWLNGKEYKCKVSNKALPAPIEKTISKAKGQPREPQVYTLPPSRDELTKNQVSLTCLVKGFYPSDIAVAWES |
| | | | NGQPENNYKTTPPVLDSDGSFFLYSKLTVDKSRWQQGNVFSCSVMHEALHAHYTQKSLSLSPGK |
| 20 | 73 | 870 | CMEALGMESGEIHSDQITASSQYSTNWSAERSRLNYPENGWTPGADSYREWIQVDLGLLRFVTAVGTQGAISKETKKKYYVK |
| | | | TYKIDVSSNGEDWITIKEGNKPVLFQGNTNPTDVVVAVFPKPLITRFVRIKPATWETGISMRFEVYGCKITDYPCSGMLGMV |
| | | | SGLISDSQITSSNQGDRNWMPENIRLVTSRSGWALPPAPHSYINEWLQIDLGEEKIVRGIIIQGGKHRENKVFMRKFKIGYS |
| | | | NNGSDWKMIMDDSKRKAKSFEGNNNYDTPELRTFPALSTRFIRIYPERATHGGLGLRMELLGCGGGGSGGGGSCMEALGMES |
| | | | GEIHSDOITASSQYSTNWSAERSRLNYPENGWTPGADSYREWIQVDLGLLRFVTAVGTQGAISKETKKKYYVKTYKIDVSSN |
| | | | TSSNQGDRNWMPENIRLVTSRSGWALPPAPHSYINEWLQIDLGEEKIVRGIIIQGGKHRENKVFMRKFKIGYSNNGSDWKMI |
| | | | MDDSKRKAKSFEGNNNYDTPELRTFPALSTRFIRIYPERATHGGLGLRMELLGCGGGGSGGGGSEPKSCDKTHTCPPCPAPE |
| | | | LLGGPSVFLFPPKPKDTLMISRTPEVTCVVVDVSHEDPEVKFNWYVDGVEVHNAKTKPREEQYASTYRVVSVLAVLHQDWLN |
| | | | GKEYKCKVSNKALPAPIEKTISKAKGQPREPQVYTLPPSRDELTKNQVSLTCLVKGFYPSDIAVAWESNGQPENNYKTTPPV |
| | | | LDSDGSFFLYSKLTVDKSRWQQGNVFSCSVMHEALHAHYTQKSLSLSPGK |
| 21 | 74 | 874 | CMEALGMESGEIHSDOITASSQYSTNWSAERSRLNYPENGWTPGADSYREWIQVDLGLLRFVTAVGTQGAISKETKKKYYVK |
| | | | TYKIDVSSNGEDWITIKEGNKPVLFQGNTNPTDVVVAVFPKPLITRFVRIKPATWETGISMRFEVYGCKITDYPCSGMLGMV |
| | | | SGLISDSQITSSNQGDRNWMPENIRLVTSRSGWALPPAPHSYINEWLQIDLGEEKIVRGIIIQGGKHRENKVFMRKFKIGYS |
| | | | NNGSDWKMIMDDSKRKAKSFEGNNNYDTPELRTFPALSTRFIRIYPERATHGGLGLRMELLGCGGGGSGGGGSEPKSCDKTH |
| | | | TCPPCPAPELLGGPSVFLFPPKPKDTLMISRTPEVTCVVVDVSHEDPEVKFNWYVDGVEVHNAKTKPREEQYASTYRVVSVL |
| | | | AVLHQDWLNGKEYKCKVSNKALPAPIEKTISKAKGQPREPQVYTLPPSRDELTKNQVSLTCLVKGFYPSDIAVAWESNGQPE |
| | | | NNYKTTPPVLDSDGSFFLYSKLTVDKSRWQQGNVFSCSVMHEALHAHYTQKSLSLSPGKGGGGSGGGGSCMEALGMESGEIH |
| | | | SDQITASSQYSTNWSAERSRLNYPENGWTPGADSYREWIQVDLGLLRFVTAVGTQGAISKETKKKYYVKTYKIDVSSNGEDW |
| | | | ITIKEGNKPVLFQGNTNPTDVVVAVFPKPLITRFVRIKPATWETGISMRFEVYGCKITDYPCSGMLGMVSGLISDSQITSSN |
| | | | QGDRNWMPENIRLVTSRSGWALPPAPHSYINEWLQIDLGEEKIVRGIIIQGGKHRENKVFMRKFKIGYSNNGSDWKMIMDDS |
| | | | KRKAKSFEGNNNYDTPELRTFPALSTRFIRIYPERATHGGLGLRMELLGCEVEA |
| 22 | | 870 | CMEALGMESGEIHSDQITASSQYSTNWSAERSRLNYPENGWTPGEDSYREWIQVDLGLLRFVTAVGTQGAISKETKKKYYVK |
| | | | TYKIDVSSNGEDWITIKEGNKPVLFQGNTNPTDVVVAVFPKPLITRFVRIKPATWETGISMRFEVYGCKITDYPCSGMLGMV |
| | | | SGLISDSQITSSNQGDRNWMPENIRLVTSRSGWALPPAPHSYINEWLQIDLGEEKIVRGIIIQGGKHRENKVFMRKFKIGYS |
| | | | NNGSDWKMIMDDSKRKAKSFEGNNNYDTPELRTFPALSTRFIRIYPERATHGGLGLRMELLGCGGGGSGGGGSCMEALGMES |
| | | | GEIHSDQITASSQYSTNWSAERSRLNYPENGWTPGEDSYREWIQVDLGLLRFVTAVGTQGAISKETKKKYYVKTYKIDVSSN |
| | | | GEDWITIKEGNKPVLFQGNTNPTDVVVAVFPKPLITRFVRIKPATWETGISMRFEVYGCKITDYPCSGMLGMVSGLISDSQI |
| | | | TSSNQGDRNWMPENIRLVTSRSGWALPPAPHSYINEWLQIDLGEEKIVRGIIIQGGKHRENKVFMRKFKIGYSNNGSDWKMI |
| | | | MDDSKRKAKSFEGNNNYDTPELRTFPALSTRFIRIYPERATHGGLGLRMELLGCGGGGSGGGGSEPKSCDKTHTCPPCPAPE |
| | | | LLGGPSVFLFPPKPKDTLMISRTPEVTCVVVDVSHEDPEVKFNWYVDGVEVHNAKTKPREEQYNSTYRVVSVLTVLHQDWLN |
| | | | GKEYKCKVSNKALPAPIEKTISKAKGQPREPQVYTLPPSRDELTKNQVSLTCLVKGFYPSDIAVEWESNGQPENNYKTTPPV |
| | | | LDSDGSFFLYSKLTVDKSRWQQGNVFSCSVMHEALHNHYTQKSLSLSPGK |
| 23 | 76 | 870 | CMEALGMESGEIHSDQITASSQASTNWSAERSRLNYPENGWTPGEDSYREWIQVDLGLLRFVTAVGTQGAIAKETKKKAYVK |
| | | | TYKIDVSSNGEDWITIKEGNKPVLFQGNTNPTDVVVAVFPKPLITRFVRIKPATWETGISMRFEVYGCKITDYPCSGMLGMV |
| | | | SGLISDSQITSSNQGDRNWMPENIRLVTSRSGWALPPAPHSYINEWLQIDLGEEKIVRGIIIQGGKHRENKVFMRKFKIGYS |
| | | | NNGSDWKMIMDDSKRKAKSFEGNNNYDTPELRTFPALSTRFIRIYPERATHGGLGLRMELLGCGGGGSGGGGSCMEALGMES |
| | | | GEIHSDQITASSQASTNWSAERSRLNYPENGWTPGEDSYREWIQVDLGLLRFVTAVGTQGAIAKETKKKAYVKTYKIDVSSN |
| | | | GEDWITIKEGNKPVLFQGNTNPTDVVVAVFPKPLITRFVRIKPATWETGISMRFEVYGCKITDYPCSGMLGMVSGLISDSQI |
| | | | TSSNQGDRNWMPENIRLVTSRSGWALPPAPHSYINEWLQIDLGEEKIVRGIIIQGGKHRENKVFMRKFKIGYSNNGSDWKMI |
| | | | MDDSKRKAKSFEGNNNYDTPELRTFPALSTRFIRIYPERATHGGLGLRMELLGCGGGGSGGGGSEPKSCDKTHTCPPCPAPE |
| | | | LLGGPSVFLFPPKPKDTLMISRTPEVTCVVVDVSHEDPEVKFNWYVDGVEVHNAKTKPREEQYNSTYRVVSVLTVLHQDWLN |
| | | | GKEYKCKVSNKALPAPIEKTISKAKGQPREPQVYTLPPSRDELTKNQVSLTCLVKGFYPSDIAVEWESNGQPENNYKTTPPV |
| | | | LDSDGSFFLYSKLTVDKSRWQQGNVFSCSVMHEALHNHYTQKSLSLSPGK |
| 24 | 77 | 870 | CMEALGMESGEIHSDQITASSQYSTNWSAERSRLNYPENGWTPGEDSYREWIQVDLGLLRFVTAVGTQGAISKETKKKYYVK |
| | | | TYKIDVSSNGEDWITIKEGNKPVLFQGNTNPTDVVVAVFPKPLITRFVRIKPATWETGISMRFEVYGCKITDYPCSGMLGMV |
| | | | SGLISDSQITSSNQGDRNWMPENIRLVTSRSGWALPPAPHSYINEWLQIDLGEEKIVRGIIIQGGKHRENKVFMRKFKIGYS |
| | | | NNGSDWKMIMDDSKRKAKSFEGNNNYDTPELRTFPALSTRFIRIYPERATHGGLGLRMELLGCGGGGSGGGGSCMEALGMES |
| | | | GEIHSDQITASSQYSTNWSAERSRLNYPENGWTPGEDSYREWIQVDLGLLRFVTAVGTQGAISKETKKKYYVKTYKIDVSSN |
| | | | TSSNQGDRNWMPENIRLVTSRSGWALPPAPHSYINEWLQIDLGEEKIVRGIIIQGGKHRENKVFMRKFKIGYSNNGSDWKMI |
| | | | MDDSKRKAKSFEGNNNYDTPELRTFPALSTRFIRIYPERATHGGLGLRMELLGCGGGGSGGGGSEPKSCDKTHTCPPCPAPE |
| | | | LLGGPSVFLFPPKPKDTLMISRTPEVTCVVVDVSHEDPEVKFNWYVDGVEVHNAKTKPREEQYASTYRVVSVLTVLHQDWLN |
| | | | GKEYKCKVSNKALPAPIEKTISKAKGQPREPQVYTLPPSRDELTKNQVSLTCLVKGFYPSDIAVEWESNGQPENNYKTTPPV |
| | | | LDSDGSFFLYSKLTVDKSRWQQGNVFSCSVMHEALHNHYTQKSLSLSPGK |
| 25 | 78 | 870 | CMEALGMESGEIHSDQITASSQYSTNWSAERSRLNYPENGWTPGEDSYREWIQVDLGLLRFVTAVGTQGAISKETKKKYYVK |
| | | | TYKIDVSSNGEDWITIKEGNKPVLFQGNTNPTDVVVAVFPKPLITRFVRIKPATWETGISMRFEVYGCKITDYPCSGMLGMV |
| | | | SGLISDSQITSSNQGDRNWMPENIRLVTSRSGWALPPAPHSYINEWLQIDLGEEKIVRGIIIQGGKHRENKVFMRKFKIGYS |
| | | | NNGSDWKMIMDDSKRKAKSFEGNNNYDTPELRTFPALSTRFIRIYPERATHGGLGLRMELLGCGGGGSGGGGSCMEALGMES |
| | | | GEIHSDQITASSQYSTNWSAERSRLNYPENGWTPGEDSYREWIQVDLGLLRFVTAVGTQGAISKETKKKYYVKTYKIDVSSN |
| | | | TSSNQGDRNWMPENIRLVTSRSGWALPPAPHSYINEWLQIDLGEEKIVRGIIIQGGKHRENKVFMRKFKIGYSNNGSDWKMI |
| | | | MDDSKRKAKSFEGNNNYDTPELRTFPALSTRFIRIYPERATHGGLGLRMELLGCGGGGSGGGGSEPKSCDKTHTCPPCPAPE |
| | | | AAGGPSVFLFPPKPKDTLMISRTPEVTCVVVDVSHEDPEVKFNWYVDGVEVHNAKTKPREEQYNSTYRVVSVLTVLHQDWLN |
| | | | GKEYKCKVSNKALPAPIEKTISKAKGQPREPQVYTLPPSRDELTKNQVSLTCLVKGFYPSDIAVEWESNGQPENNYKTTPPV |
| | | | LDSDGSFFLYSKLTVDKSRWQQGNVFSCSVMHEALHNHYTQKSLSLSPGK |
| 26 | 79 | 870 | CMEALGMESGEIHSDQITASSQYSTNWSAERSRLNYPENGWTPGADSYREWIQVDLGLLRFVTAVGTQGAISKETKKKYYVK |
| | | | TYKIDVSSNGEDWITIKEGNKPVLFQGNTNPTDVVVAVFPKPLITRFVRIKPATWETGISMRFEVYGCKITDYPCSGMLGMV |
| | | | SGLISDSQITSSNQGDRNWMPENIRLVTSRSGWALPPAPHSYINEWLQIDLGEEKIVRGIIIQGGKHRENKVFMRKFKIGYS |
| | | | NNGSDWKMIMDDSKRKAKSFEGNNNYDTPELRTFPALSTRFIRIYPERATHGGLGLRMELLGCGGGGSGGGGSCMEALGMES |
| | | | GEIHSDQITASSQYSTNWSAERSRLNYPENGWTPGADSYREWIQVDLGLLRFVTAVGTQGAISKETKKKYYVKTYKIDVSSN |
| | | | GEDWITIKEGNKPVLFQGNTNPTDVVVAVFPKPLITRFVRIKPATWETGISMRFEVYGCKITDYPCSGMLGMVSGLISDSQI |
| | | | TSSNQGDRNWMPENIRLVTSRSGWALPPAPHSYINEWLQIDLGEEKIVRGIIIQGGKHRENKVFMRKFKIGYSNNGSDWKMI |
| | | | MDDSKRKAKSFEGNNNYDTPELRTFPALSTRFIRIYPERATHGGLGLRMELLGCGGGGSGGGGSEPKSCDKTHTCPPCPAPE |
| | | | LLGGPSVFLFPPKPKDTLMISRTPEVTCVVVDVSHEDPEVKFNWYVDGVEVHNAKTKPREEQYNSTYRVVSVLTVLHQDWLN |
| | | | GKEYKCKVSNKALPAPIEKTISKAKGQPREPQVYTLPPSRDELTKNQVSLTCLVKGFYPSDIAVEWESNGQPENNYKTTPPV |
| | | | LDSDGSFFLYSKLTVDKSRWQQGNVFSCSVMHEALHNHYTQKSLSLSPGK |
| 27 | 80 | 870 | CMEALGMESGEIHSDQITASSQYSTNWSAERSRLNYPENGWTPGADSYREWIQVDLGLLRFVTAVGTQGAISKETKKKYYVK |
| | | | TYKIDVSSNGEDWITIKEGNKPVLFQGNTNPTDVVVAVFPKPLITRFVRIKPATWETGISMRFEVYGCKITDYPCSGMLGMV |
| | | | SGLISDSQITSSNQGDRNWMPENIRLVTSRSGWALPPAPHSYINEWLQIDLGEEKIVRGIIIQGGKHRENKVFMRKFKIGYS |
| | | | NNGSDWKMIMDDSKRKAKSFEGNNNYDTPELRTFPALSTRFIRIYPERATHGGLGLRMELLGCGGGGSGGGGSCMEALGMES |
| | | | GEIHSDQITASSQYSTNWSAERSRLNYPENGWTPGADSYREWIQVDLGLLRFVTAVGTQGAISKETKKKYYVKTYKIDVSSN |
| | | | GEDWITIKEGNKPVLFQGNTNPTDVVVAVFPKPLITRFVRIKPATWETGISMRFEVYGCKITDYPCSGMLGMVSGLISDSQI |
| | | | TSSNQGDRNWMPENIRLVTSRSGWALPPAPHSYINEWLQIDLGEEKIVRGIIIQGGKHRENKVFMRKFKIGYSNNGSDWKMI |
| | | | MDDSKRKAKSFEGNNNYDTPELRTFPALSTRFIRIYPERATHGGLGLRMELLGCGGGGSGGGGSEPKSCDKTHTCPPCPAPE |
| | | | LLGGPSVFLFPPKPKDTLMISRTPEVTCVVVDVSHEDPEVKFNWYVDGVEVHNAKTKPREEQYASTYRVVSVLTVLHQDWLN |
| | | | GKEYKCKVSNKALPAPIEKTISKAKGQPREPQVYTLPPSRDELTKNQVSLTCLVKGFYPSDIAVEWESNGQPENNYKTTPPV |
| | | | LDSDGSFFLYSKLTVDKSRWQQGNVFSCSVMHEALHNHYTQKSLSLSPGK |
| 28 | 81 | 874 | CMEALGMESGEIHSDQITASSQYSTNWSAERSRLNYPENGWTPGEDSYREWIQVDLGLLRFVTAVGTQGAISKETKKKYYVK |
| | | | SGLISDSQITSSNQGDRNWMPENIRLVTSRSGWALPPAPHSYINEWLQIDLGEEKIVRGIIIQGGKHRENKVFMRKFKIGYS |
| | | | NNGSDWKMIMDDSKRKAKSFEGNNNYDTPELRTFPALSTRFIRIYPERATHGGLGLRMELLGCGGGGSGGGGSEPKSCDKTH |
| | | | TCPPCPAPELLGGPSVFLFPPKPKDTLMISRTPEVTCVVVDVSHEDPEVKFNWYVDGVEVHNAKTKPREEQYNSTYRVVSVL |
| | | | TVLHQDWLNGKEYKCKVSNKALPAPIEKTISKAKGQPREPQVYTLPPSRDELTKNQVSLTCLVKGFYPSDIAVEWESNGQPE |
| | | | NNYKTTPPVLDSDGSFFLYSKLTVDKSRWQQGNVFSCSVMHEALHNHYTQKSLSLSPGKGGGGSGGGGSCMEALGMESGEIH |
| | | | SDQITASSQYSTNWSAERSRLNYPENGWTPGEDSYREWIQVDLGLLRFVTAVGTQGAISKETKKKYYVKTYKIDVSSNGEDW |
| | | | QGDRNWMPENIRLVTSRSGWALPPAPHSYINEWLQIDLGEEKIVRGIIIQGGKHRENKVFMRKFKIGYSNNGSDWKMIMDDS |
| | | | KRKAKSFEGNNNYDTPELRTFPALSTRFIRIYPERATHGGLGLRMELLGCEVEA |
| 29 | 82 | 870 | CMEALGMESGEIHSDQITASSQYSTNWSAERSRLNYPENGWTPGEDSYREWIQVDLGLLRFVTAVGTQGAISKETKAKYYVK |
| | | | TYKIDVSSNGEDWITIKEGNKPVLFQGNTNPTDVVVAVFPKPLITRFVRIKPATWETGISMRFEVYGCKITDYPCSGMLGMV |
| | | | SGLISDSQITSSNQGDRNWMPENIRLVTSRSGWALPPAPHSYINEWLQIDLGEEKIVRGIIIQGGKHRENKVFMRKFKIGYS |
| | | | NNGSDWKMIMDDSKRKAKSFEGNNNYDTPELRTFPALSTRFIRIYPERATHGGLGLRMELLGCGGGGSGGGGSCMEALGMES |
| | | | GEIHSDQITASSQYSTNWSAERSRLNYPENGWTPGEDSYREWIQVDLGLLRFVTAVGTQGAISKETKAKYYVKTYKIDVSSN |
| | | | TSSNQGDRNWMPENIRLVTSRSGWALPPAPHSYINEWLQIDLGEEKIVRGIIIQGGKHRENKVFMRKFKIGYSNNGSDWKMI |
| | | | MDDSKRKAKSFEGNNNYDTPELRTFPALSTRFIRIYPERATHGGLGLRMELLGCGGGGSGGGGSEPKSCDKTHTCPPCPAPE |
| | | | LLGGPSVFLFPPKPKDTLMISRTPEVTCVVVDVSHEDPEVKFNWYVDGVEVHNAKTKPREEQYASTYRVVSVLAVLHQDWLN |
| | | | GKEYKCKVSNKALPAPIEKTISKAKGQPREPQVYTLPPSRDELTKNQVSLTCLVKGFYPSDIAVAWESNGQPENNYKTTPPV |
| | | | LDSDGSFFLYSKLTVDKSRWQQGNVFSCSVMHEALHAHYTQKSLSLSPGK |
| 30 | 83 | 870 | CMEALGMESGEIHSDQITASSQYSTNWSAERSRLNYPENGWTPGEDSYREWIQVDLGLLRFVTAVGTQGAISKETKAKYYVK |
| | | | TYKIDVSSNGEDWITIKEGNKPVLFQGNTNPTDVVVAVFPKPLITRFVRIKPATWETGISMRFEVYGCKITDYPCSGMLGMV |
| | | | SGLISDSQITSSNQGDRNWMPENIRLVTSRSGWALPPAPHSYINEWLQIDLGEEKIVRGIIIQGGKHRENKVFMRKFKIGYS |
| | | | NNGSDWKMIMDDSKRKAKSFEGNNNYDTPELRTFPALSTRFIRIYPERATHGGLGLRMELLGCGGGGSGGGGSCMEALGMES |
| | | | GEIHSDQITASSQYSTNWSAERSRLNYPENGWTPGEDSYREWIQVDLGLLRFVTAVGTQGAISKETKAKYYVKTYKIDVSSN |
| | | | TSSNQGDRNWMPENIRLVTSRSGWALPPAPHSYINEWLQIDLGEEKIVRGIIIQGGKHRENKVFMRKFKIGYSNNGSDWKMI |
| | | | MDDSKRKAKSFEGNNNYDTPELRTFPALSTRFIRIYPERATHGGLGLRMELLGCGGGGSGGGGSEPKSCDKTHTCPPCPAPE |
| | | | AAGGPSVFLFPPKPKDTLMISRTPEVTCVVVDVSHEDPEVKFNWYVDGVEVHNAKTKPREEQYNSTYRVVSVLAVLHQDWLN |
| | | | GKEYKCKVSNKALPAPIEKTISKAKGQPREPQVYTLPPSRDELTKNQVSLTCLVKGFYPSDIAVAWESNGQPENNYKTTPPV |
| | | | LDSDGSFFLYSKLTVDKSRWQQGNVFSCSVMHEALHAHYTQKSLSLSPGK |
| 31 | 84 | 870 | CMEALGMESGEIHSDQITASSQYSTNWSAERSRLNYPENGWTPGEDSYREWIQVDLGLLRFVTAVGTQGAISKETKKKYYVK |
| | | | TYKIDVSSNGEDWITIKEGNKPVLFQGNTNPTDVVVAVFPKPLITRFVRIKPATWETGISMRFEVYGCKITDYPCSGMLGMV |
| | | | SGLISDSQITSSNQGDRNWMPENIRLVTSRSGWALPPAPHSYINEWLQIDLGEEKIVRGIIIQGGKHRENKVFMRKFKIGYS |
| | | | NNGSDWKMIMDDSKRKAKSFEGNNNYDTPELRTFPALSTRFIRIYPERATHGGLGLRMELLGCGGGGSGGGGSCMEALGMES |
| | | | GEIHSDQITASSQYSTNWSAERSRLNYPENGWTPGEDSYREWIQVDLGLLRFVTAVGTQGAISKETKKKYYVKTYKIDVSSN |
| | | | TSSNQGDRNWMPENIRLVTSRSGWALPPAPHSYINEWLQIDLGEEKIVRGIIIQGGKHRENKVFMRKFKIGYSNNGSDWKMI |
| | | | MDDSKRKAKSFEGNNNYDTPELRTFPALSTRFIRIYPERATHGGLGLRMELLGCGGGGSGGGGSEPKSCDKTHTCPPCPAPE |
| | | | LLGGPSVFLFPPKPKDTLMISRTPEVTCVVVDVSHEDPEVKFNWYVDGVEVHNAKTKPREEQYASTYRVVSVLAVLHQDWLN |
| | | | GKEYKCKVSNKALPAPIEKTISKAKGQPREPQVYTLPPSRDELTKNQVSLTCLVKGFYPSDIAVAWESNGQPENNYKTTPPV |
| | | | LDSDGSFFLYSKLTVDKSRWQQGNVFSCSVMHEALHAHYTQKSLSLSPGK |
| 32 | 85 | 870 | CMEALGMESGEIHSDQITASSQYSTNWSAERSRLNYPENGWTPGEDSYREWIQVDLGLLRFVTAVGTQGAISKETKKKYYVK |
| | | | TYKIDVSSNGEDWITIKEGNKPVLFQGNTNPTDVVVAVFPKPLITRFVRIKPATWETGISMRFEVYGCKITDYPCSGMLGMV |
| | | | SGLISDSQITSSNQGDRNWMPENIRLVTSRSGWALPPAPHSYINEWLQIDLGEEKIVRGIIIQGGKHRENKVFMRKFKIGYS |
| | | | NNGSDWKMIMDDSKRKAKSFEGNNNYDTPELRTFPALSTRFIRIYPERATHGGLGLRMELLGCGGGGSGGGGSCMEALGMES |
| | | | GEIHSDOITASSQYSTNWSAERSRLNYPENGWTPGEDSYREWIQVDLGLLRFVTAVGTQGAISKETKKKYYVKTYKIDVSSN |
| | | | TSSNQGDRNWMPENIRLVTSRSGWALPPAPHSYINEWLQIDLGEEKIVRGIIIQGGKHRENKVFMRKFKIGYSNNGSDWKMI |
| | | | MDDSKRKAKSFEGNNNYDTPELRTFPALSTRFIRIYPERATHGGLGLRMELLGCGGGGSGGGGSEPKSCDKTHTCPPCPAPE |
| | | | AAGGPSVFLFPPKPKDTLMISRTPEVTCVVVDVSHEDPEVKFNWYVDGVEVHNAKTKPREEQYNSTYRVVSVLAVLHQDWLN |
| | | | GKEYKCKVSNKALPAPIEKTISKAKGQPREPQVYTLPPSRDELTKNQVSLTCLVKGFYPSDIAVAWESNGQPENNYKTTPPV |
| | | | LDSDGSFFLYSKLTVDKSRWQQGNVFSCSVMHEALHAHYTQKSLSLSPGK |
| 33 | 86 | 870 | CMEALGMESGEIHSDQITASSQYSTNWSAERSRLNYPENGWTPGADSYREWIQVDLGLLRFVTAVGTQGAISKETKKKYYVK |
| | | | TYKIDVSSNGEDWITIKEGNKPVLFQGNTNPTDVVVAVFPKPLITRFVRIKPATWETGISMRFEVYGCKITDYPCSGMLGMV |
| | | | SGLISDSQITSSNQGDRNWMPENIRLVTSRSGWALPPAPHSYINEWLQIDLGEEKIVRGIIIQGGKHRENKVFMRKFKIGYS |
| | | | NNGSDWKMIMDDSKRKAKSFEGNNNYDTPELRTFPALSTRFIRIYPERATHGGLGLRMELLGCGGGGSGGGGSCMEALGMES |
| | | | GEIHSDQITASSQYSTNWSAERSRLNYPENGWTPGADSYREWIQVDLGLLRFVTAVGTQGAISKETKKKYYVKTYKIDVSSN |
| | | | GEDWITIKEGNKPVLFQGNTNPTDVVVAVFPKPLITRFVRIKPATWETGISMRFEVYGCKITDYPCSGMLGMVSGLISDSQI |
| | | | TSSNQGDRNWMPENIRLVTSRSGWALPPAPHSYINEWLQIDLGEEKIVRGIIIQGGKHRENKVFMRKFKIGYSNNGSDWKMI |
| | | | MDDSKRKAKSFEGNNNYDTPELRTFPALSTRFIRIYPERATHGGLGLRMELLGCGGGGSGGGGSEPKSCDKTHTCPPCPAPE |
| | | | AAGGPSVFLFPPKPKDTLMISRTPEVTCVVVDVSHEDPEVKFNWYVDGVEVHNAKTKPREEQYNSTYRVVSVLAVLHQDWLN |
| | | | GKEYKCKVSNKALPAPIEKTISKAKGQPREPQVYTLPPSRDELTKNQVSLTCLVKGFYPSDIAVAWESNGQPENNYKTTPPV |
| | | | LDSDGSFFLYSKLTVDKSRWQQGNVFSCSVMHEALHAHYTQKSLSLSPGK |
| 34 | 87 | 874 | CMEALGMESGEIHSDQITASSQYSTNWSAERSRLNYPENGWTPGADSYREWIQVDLGLLRFVTAVGTQGAISKETKKKYYVK |
| | | | TYKIDVSSNGEDWITIKEGNKPVLFQGNTNPTDVVVAVFPKPLITRFVRIKPATWETGISMRFEVYGCKITDYPCSGMLGMV |
| | | | SGLISDSQITSSNQGDRNWMPENIRLVTSRSGWALPPAPHSYINEWLQIDLGEEKIVRGIIIQGGKHRENKVFMRKFKIGYS |
| | | | NNGSDWKMIMDDSKRKAKSFEGNNNYDTPELRTFPALSTRFIRIYPERATHGGLGLRMELLGCGGGGSGGGGSEPKSCDKTH |
| | | | TCPPCPAPEAAGGPSVFLFPPKPKDTLMISRTPEVTCVVVDVSHEDPEVKFNWYVDGVEVHNAKTKPREEQYNSTYRVVSVL |
| | | | AVLHQDWLNGKEYKCKVSNKALPAPIEKTISKAKGQPREPQVYTLPPSRDELTKNQVSLTCLVKGFYPSDIAVAWESNGQPE |
| | | | NNYKTTPPVLDSDGSFFLYSKLTVDKSRWQQGNVFSCSVMHEALHAHYTQKSLSLSPGKGGGGSGGGGSCMEALGMESGEIH |
| | | | SDQITASSQYSTNWSAERSRLNYPENGWTPGADSYREWIQVDLGLLRFVTAVGTQGAISKETKKKYYVKTYKIDVSSNGEDW |
| | | | ITIKEGNKPVLFQGNTNPTDVVVAVFPKPLITRFVRIKPATWETGISMRFEVYGCKITDYPCSGMLGMVSGLISDSQITSSN |
| | | | QGDRNWMPENIRLVTSRSGWALPPAPHSYINEWLQIDLGEEKIVRGIIIQGGKHRENKVFMRKFKIGYSNNGSDWKMIMDDS |
| | | | KRKAKSFEGNNNYDTPELRTFPALSTRFIRIYPERATHGGLGLRMELLGCEVEA |
| 35 | 88 | 866 | CMEALGMESGEIHSDQITASSQYSTNWSAERSRLNYPENGWTPGEDSYREWIQVDLGLLRFVTAVGTQGAISKETKKKYYVK |
| | | | TYKIDVSSNGEDWITIKEGNKPVLFQGNTNPTDVVVAVFPKPLITRFVRIKPATWETGISMRFEVYGCKITDYPCSGMLGMV |
| | | | SGLISDSQITSSNQGDRNWMPENIRLVTSRSGWALPPAPHSYINEWLQIDLGEEKIVRGIIIQGGKHRENKVFMRKFKIGYS |
| | | | NNGSDWKMIMDDSKRKAKSFEGNNNYDTPELRTFPALSTRFIRIYPERATHGGLGLRMELLGCGGGGSGGGGSCMEALGMES |
| | | | GEIHSDQITASSQYSTNWSAERSRLNYPENGWTPGEDSYREWIQVDLGLLRFVTAVGTQGAISKETKKKYYVKTYKIDVSSN |
| | | | GEDWITIKEGNKPVLFQGNTNPTDVVVAVFPKPLITRFVRIKPATWETGISMRFEVYGCKITDYPCSGMLGMVSGLISDSQI |
| | | | TSSNQGDRNWMPENIRLVTSRSGWALPPAPHSYINEWLQIDLGEEKIVRGIIIQGGKHRENKVFMRKFKIGYSNNGSDWKMI |
| | | | MDDSKRKAKSFEGNNNYDTPELRTFPALSTRFIRIYPERATHGGLGLRMELLGCGGGGSGGGGSERKCCVECPPCPAPPVAG |
| | | | PSVFLFPPKPKDQLMISRTPEVTCVVVDVSHEDPEVQFNWYVDGVEVHNAKTKPREEQFNSTFRVVSVLTVVHQDWLNGKEY |
| | | | KCKVSNKGLPAPIEKTISKTKGQPREPQVYTLPPSREEMTKNQVSLTCLVKGFYPSDIAVEWESNGQPENNYKTTPPMLDSD |
| | | | GSFFLYSKLTVDKSRWQQGNVFSCSVLHEALHNHYTQKSLSLSPGK |
| 36 | 89 | 870 | CMEALGMESGEIHSDQITASSQYSTNWSAERSRLNYPENGWTPGEDSYREWIQVDLGLLRFVTAVGTQGAISKETKKKYYVK |
| | | | SGLISDSQITSSNQGDRNWMPENIRLVTSRSGWALPPAPHSYINEWLQIDLGEEKIVRGIIIQGGKHRENKVFMRKFKIGYS |
| | | | NNGSDWKMIMDDSKRKAKSFEGNNNYDTPELRTFPALSTRFIRIYPERATHGGLGLRMELLGCGGGGSGGGGSERKCCVECP |
| | | | PCPAPPVAGPSVFLFPPKPKDQLMISRTPEVTCVVVDVSHEDPEVQFNWYVDGVEVHNAKTKPREEQFNSTFRVVSVLTVVH |
| | | | QDWLNGKEYKCKVSNKGLPAPIEKTISKTKGQPREPQVYTLPPSREEMTKNQVSLTCLVKGFYPSDIAVEWESNGQPENNYK |
| | | | TTPPMLDSDGSFFLYSKLTVDKSRWQQGNVFSCSVLHEALHNHYTQKSLSLSPGKGGGGSGGGGSCMEALGMESGEIHSDQI |
| | | | TASSQYSTNWSAERSRLNYPENGWTPGEDSYREWIQVDLGLLRFVTAVGTQGAISKETKKKYYVKTYKIDVSSNGEDWITIK |
| | | | EGNKPVLFQGNTNPTDVVVAVFPKPLITRFVRIKPATWETGISMRFEVYGCKITDYPCSGMLGMVSGLISDSQITSSNQGDR |
| | | | NWMPENIRLVTSRSGWALPPAPHSYINEWLQIDLGEEKIVRGIIIQGGKHRENKVFMRKFKIGYSNNGSDWKMIMDDSKRKA |
| | | | KSFEGNNNYDTPELRTFPALSTRFIRIYPERATHGGLGLRMELLGCEVEA |

[0201] Neuropilin-Immunoglobulin-ACE2 Constructs

[0202] In still another aspect of the current invention, a polypeptide may comprise a b1 domain, or a derivative or fragment thereof, of a neuropilin; an immunoglobulin domain; and an ACE2 domain, or a derivative or a fragment thereof, of an angiotensin converting enzyme 2. Both the b1 and ACE2 domains of these polypeptides are capable of binding to a coat protein of a virus selected from the group consisting of herpesviridae, papillomaviridae, coronaviridae, flaviviridae, togaviridae, bornaviridae, bunyaviridae, filoviridae, orthomyxoviridae, paramyxoviridae, pneumoviridae, and retroviridae. Referring to FIG. 5, a variety of exemplary schematic designs are provided for polypeptides having the b1 domain, or a derivative or fragment thereof, coupled to the ACE2 domain, or a derivative or a fragment thereof, that is additionally coupled to the immunoglobulin domain. Table 8A outlines the general structure and connectivity of several exemplary, but not intending to be limited to, neuropilin-immunoglobulin-ACE2 constructs (Construct Nos. 4-11 and 37-59) or polypeptides including b1, ACE2, linker, and immunoglobulin domains. In some embodiments, the polypeptide has a configuration selected from the group of Construct Nos. 4-11 and 37-59. Table 8B provides a list of these same exemplary constructs from Table 8A including the neuropilin-immunoglobulin-ACE2 polypeptides including b1, ACE2, linker, and immunoglobulin domains and their corresponding peptide sequences.

TABLE 8A
Neuropilin-Immunoglobulin-ACE2 constructs.

| Construct | | | | | | | NRP | IgG |
|---|---|---|---|---|---|---|---|---|
| No. | N-term (NRP1) | Linker | Stem | Linker4 | C-term (ACE2) | Note | type | Subtype |
| 4 | ACE2-1 | (G4S)2 | IgG1 | (G4S)2 | (b1b2)-(G4S)2- | | NRP1 | IgG1 |
| | | | Fc | | (b1b2) | | | |
| 5 | ACE2-2 | (G4S)2 | IgG1 | (G4S)2 | (b1b2)-(G4S)2- | | NRP1 | IgG1 |
| | | | Fc | | (b1b2) | | | |
| 6 | ACE2-3 | (G4S)2 | IgG1 | (G4S)2 | (b1b2)-(G4S)2- | | NRP1 | IgG1 |
| | | | Fc | | (b1b2) | | | |
| 7 | ACE2-4 | (G4S)2 | IgG1 | (G4S)2 | (b1b2)-(G4S)2- | | NRP1 | IgG1 |
| | | | Fc | | (b1b2) | | | |
| 8 | ACE2-2 | (G4S)2 | IgG1 | (G4S)2 | (b1b2)-(G4S)2- | b1(E319A) | NRP1 | IgG1 |
| | | | Fc | | (b1b2) | | | |
| 9 | ACE2-4 | (G4S)2 | IgG1 | (G4S)2 | (b1b2)-(G4S)2- | b1(E319A) | NRP1 | IgG1 |
| | | | Fc | | (b1b2) | | | |
| 10 | ACE2-5 | (G4S)2 | IgG1 | (G4S)2 | (b1b2)-(G4S)2- | b1(E319A) | NRP1 | IgG1 |
| | | | Fc | | (b1b2) | | | |
| 11 | ACE2-6 | (G4S)2 | IgG1 | (G4S)2 | (b1b2)-(G4S)2- | b1(E319A) | NRP1 | IgG1 |
| | | | Fc | | (b1b2) | | | |
| 37 | (b1b2)-(G4S)2- | (G4S)2 | IgG1 | (G4S)2 | ACE2-1 | | NRP1 | IgG1 |
| | (b1b2) | | Fc | | | | | |
| 38 | (b1b2)-(G4S)2- | (G4S)2 | IgG1 | (G4S)2 | ACE2-2 | | NRP1 | IgG1 |
| | (b1b2) | | Fc | | | | | |
| 39 | (b1b2)-(G4S)2- | (G4S)2 | IgG1 | (G4S)2 | ACE2-3 | | NRP1 | IgG1 |
| | (b1b2) | | Fc | | | | | |
| 40 | (b1b2)-(G4S)2- | (G4S)2 | IgG1 | (G4S)2 | ACE2-4 | | NRP1 | IgG1 |
| | (b1b2) | | Fc | | | | | |
| 41 | (b1b2)-(G4S)2- | (G4S)2 | IgG1 | (G4S)2 | ACE2-2 | b1(E319A) | NRP1 | IgG1 |
| | (b1b2) | | Fc | | | | | |
| 42 | (b1b2)-(G4S)2- | (G4S)2 | IgG1 | (G4S)2 | ACE2-4 | b1(E319A) | NRP1 | IgG1 |
| | (b1b2) | | Fc | | | | | |
| 43 | (b1b2)-(G4S)2- | (G4S)2 | IgG1 | (G4S)2 | ACE2-5 | b1(E319A) | NRP1 | IgG1 |
| | (b1b2) | | Fc | | | | | |
| 44 | (b1b2)-(G4S)2- | (G4S)2 | IgG1 | (G4S)2 | ACE2-6 | b1(E319A) | NRP1 | IgG1 |
| | (b1b2) | | Fc | | | | | |
| 45 | (b1b2)-(G4S)2- | (G4S)2 | IgG1 | (G4S)2 | ACE2-2 | b1b2 of NRP-2 | NRP2 | IgG1 |
| | (b1b2) | | Fc | | | | | |
| 46 | (b1b2)-(G4S)2- | (G4S)2 | IgG1 | (G4S)2 | ACE2-1 | | NRP1 | IgG1 |
| | (b1b2) | | Fc | | | | | |
| 47 | (b1b2)-(G4S)2- | (G4S)2 | IgG1 | (G4S)2 | ACE2-2 | | NRP1 | IgG1 |
| | (b1b2) | | Fc | | | | | |
| 48 | (b1b2)-(G4S)2- | (G4S)2 | IgG1 | (G4S)2 | ACE2-2 | No ADCC | NRP1 | IgG1 |
| | (b1b2) | | Fc | | | | | |
| 49 | (b1b2)-(G4S)2- | (G4S)2 | IgG1 | (G4S)2 | ACE2-2 | LALA mutation | NRP1 | IgG1 |
| | (b1b2) | | Fc | | | | | |
| 50 | (b1b2)-(G4S)2- | (G4S)2 | IgG1 | (G4S)2 | ACE2 α1β | Monomeric ACE2-1 | NRP1 | IgG1 |
| | (b1b2) | | Fc | | | | | |
| 51 | (b1b2)-(G4S)2- | (G4S)2 | IgG1 | (G4S)2 | ACE2 α1α2β | Monomeric ACE2-2 | NRP1 | IgGI |
| | (b1b2) | | Fc | | | | | |
| 52 | (b1b2)-(G4S)2- | (G4S)2 | IgG1 | (G4S)2 | ACE2-2 | No ADCC | NRP1 | IgG1 |
| | (b1b2) | | Fc | | | | | |
| 53 | (b1b2)-(G4S)2- | (G4S)2 | IgG1 | (G4S)2 | ACE2-2 | LALA mutation | NRP1 | IgG1 |
| | (b1b2) | | Fc | | | | | |
| 54 | (b1b2)-(G4S)2- | (G4S)2 | IgG1 | (G4S)2 | ACE2-2 | b1(E319A)-No ADCC | NRP1 | IgG1 |
| | (b1b2) | | Fc | | | | | |
| 55 | (b1b2)-(G4S)2- | (G4S)2 | IgG1 | (G4S)2 | ACE2-2 | b1(E319A)-LALA | NRP1 | IgG1 |
| | (b1b2) | | Fc | | | mutation | | |
| 56 | (b1b2)-(G4S)2- | (G4S)2 | IgG2 | (G4S)2 | ACE2-2 | | NRP1 | IgG2 |
| | (b1b2) | | Fc | | | | | |
| 57 | (b1b2)-(G4S)2- | (G4S)2 | IgG2 | (G4S)2 | ACE2-2 | b1(E319A) | NRP1 | IgG2 |
| | (b1b2) | | Fc | | | | | |
| 58 | (b1b2)-(G4S)2- | (G4S)2 | IgG1 | (G4S)2 | ACE2-2 | b1(Y297A, S346A, | NRP1 | IgG1 |
| | (b1b2) | | Fc | | | Y353A)-No ADCC | | |
| 59 | (b1b2)-(G4S)2- | (G4S)2 | IgG1 | (G4S)2 | ACE2-2 | b1(Y297A, S346A, | NRP1 | IgG1 |
| | (b1b2) | | Fc | | | Y353A)-LALA | | |
| | | | | | | mutation | | |

TABLE 8B
Neuropilin-Immunoglobulin-ACE2 constructs (SEQ ID NOS. 57-64, 90-112).

| | SEQ | | |
|---|---|---|---|
| Construct | ID | | |
| No. | NO: | Length | Sequence |
| 4 | 57 | 637 | EEQAKTFLDKFNHEAEDLFYQSSGLGKGDFRGGGGSGGGGSEEQAKTFLDKFNHEAEDLFYQSSGLGKGDFRGGGGSGG |
| | | | GGSEPKSCDKTHTCPPCPAPELLGGPSVFLFPPKPKDTLMISRTPEVTCVVVDVSHEDPEVKFNWYVDGVEVHNAKTKP |
| | | | REEQYNSTYRVVSVLTVLHQDWLNGKEYKCKVSNKALPAPIEKTISKAKGQPREPQVYTLPPSRDELTKNQVSLTCLVK |
| | | | GFYPSDIAVEWESNGQPENNYKTTPPVLDSDGSFFLYSKLTVDKSRWQQGNVFSCSVMHEALHNHYTQKSLSLSPGKGG |
| | | | GGSGGGGSCMEALGMESGEIHSDQITASSQYSTNWSAERSRLNYPENGWTPGEDSYREWIQVDLGLLRFVTAVGTQGAI |
| | | | SKETKKKYYVKTYKIDVSSNGEDWITIKEGNKPVLFQGNTNPTDVVVAVFPKPLITRFVRIKPATWETGISMRFEVYGC |
| | | | KITDYPCSGMLGMVSGLISDSQITSSNQGDRNWMPENIRLVTSRSGWALPPAPHSYINEWLQIDLGEEKIVRGIIIQGG |
| | | | KHRENKVFMRKFKIGYSNNGSDWKMIMDDSKRKAKSFEGNNNYDTPELRTFPALSTRFIRIYPERATHGGLGLRMELLG |
| | | | CEVEA |
| 5 | 58 | 729 | IEEQAKTFLDKFNHEAEDLFYQSSLASWNYNTNITEENVQNMNNAGDKWSAFLKEQSTLAQMYPLQEIWDLGKGDFRGG |
| | | | GGSGGGGSIEEQAKTFLDKFNHEAEDLFYQSSLASWNYNTNITEENVQNMNNAGDKWSAFLKEQSTLAQMYPLQEIWDL |
| | | | GKGDFRGGGGSGGGGSEPKSCDKTHTCPPCPAPELLGGPSVFLFPPKPKDTLMISRTPEVTCVVVDVSHEDPEVKFNWY |
| | | | VDGVEVHNAKTKPREEQYNSTYRVVSVLTVLHQDWLNGKEYKCKVSNKALPAPIEKTISKAKGQPREPQVYTLPPSRDE |
| | | | LTKNQVSLTCLVKGFYPSDIAVEWESNGQPENNYKTTPPVLDSDGSFFLYSKLTVDKSRWQQGNVFSCSVMHEALHNHY |
| | | | TQKSLSLSPGKGGGGSGGGGSCMEALGMESGEIHSDQITASSQYSTNWSAERSRLNYPENGWTPGEDSYREWIQVDLGL |
| | | | LRFVTAVGTQGAISKETKKKYYVKTYKIDVSSNGEDWITIKEGNKPVLFQGNTNPTDVVVAVFPKPLITRFVRIKPATW |
| | | | ETGISMRFEVYGCKITDYPCSGMLGMVSGLISDSQITSSNQGDRNWMPENIRLVTSRSGWALPPAPHSYINEWLQIDLG |
| | | | EEKIVRGIIIQGGKHRENKVFMRKFKIGYSNNGSDWKMIMDDSKRKAKSFEGNNNYDTPELRTFPALSTRFIRIYPERA |
| | | | THGGLGLRMELLGCEVEA |
| 6 | 59 | 637 | EEQAKTWLDKFNHEAEDLFYQSSGLGKGDFRGGGGSGGGGSEEQAKTWLDKFNHEAEDLFYQSSGLGKGDFRGGGGSGG |
| | | | GGSEPKSCDKTHTCPPCPAPELLGGPSVFLFPPKPKDTLMISRTPEVTCVVVDVSHEDPEVKFNWYVDGVEVHNAKTKP |
| | | | REEQYNSTYRVVSVLTVLHQDWLNGKEYKCKVSNKALPAPIEKTISKAKGQPREPQVYTLPPSRDELTKNQVSLTCLVK |
| | | | GFYPSDIAVEWESNGQPENNYKTTPPVLDSDGSFFLYSKLTVDKSRWQQGNVFSCSVMHEALHNHYTQKSLSLSPGKGG |
| | | | GGSGGGGSCMEALGMESGEIHSDQITASSQYSTNWSAERSRLNYPENGWTPGEDSYREWIQVDLGLLRFVTAVGTQGAI |
| | | | SKETKKKYYVKTYKIDVSSNGEDWITIKEGNKPVLFQGNTNPTDVVVAVFPKPLITRFVRIKPATWETGISMRFEVYGC |
| | | | KITDYPCSGMLGMVSGLISDSQITSSNQGDRNWMPENIRLVTSRSGWALPPAPHSYINEWLQIDLGEEKIVRGIIIQGG |
| | | | KHRENKVFMRKFKIGYSNNGSDWKMIMDDSKRKAKSFEGNNNYDTPELRTFPALSTRFIRIYPERATHGGLGLRMELLG |
| | | | CEVEA |
| 7 | 60 | 729 | IEEQAKTWLDKFNHEAEDLFYQSSLASWNYNTNITEENVQNMNNAGDKWSAFLKEQSTLAQMYPLQEIWDLGKGDFRGG |
| | | | GGSGGGGSIEEQAKTWLDKFNHEAEDLFYQSSLASWNYNTNITEENVQNMNNAGDKWSAFLKEQSTLAQMYPLQEIWDL |
| | | | GKGDFRGGGGSGGGGSEPKSCDKTHTCPPCPAPELLGGPSVFLFPPKPKDTLMISRTPEVTCVVVDVSHEDPEVKFNWY |
| | | | VDGVEVHNAKTKPREEQYNSTYRVVSVLTVLHQDWLNGKEYKCKVSNKALPAPIEKTISKAKGQPREPQVYTLPPSRDE |
| | | | LTKNQVSLTCLVKGFYPSDIAVEWESNGQPENNYKTTPPVLDSDGSFFLYSKLTVDKSRWQQGNVFSCSVMHEALHNHY |
| | | | TQKSLSLSPGKGGGGSGGGGSCMEALGMESGEIHSDQITASSQYSTNWSAERSRLNYPENGWTPGEDSYREWIQVDLGL |
| | | | LRFVTAVGTQGAISKETKKKYYVKTYKIDVSSNGEDWITIKEGNKPVLFQGNTNPTDVVVAVFPKPLITRFVRIKPATW |
| | | | ETGISMRFEVYGCKITDYPCSGMLGMVSGLISDSQITSSNQGDRNWMPENIRLVTSRSGWALPPAPHSYINEWLQIDLG |
| | | | EEKIVRGIIIQGGKHRENKVFMRKFKIGYSNNGSDWKMIMDDSKRKAKSFEGNNNYDTPELRTFPALSTRFIRIYPERA |
| | | | THGGLGLRMELLGCEVEA |
| 8 | 61 | 1048 | IEEQAKTFLDKFNHEAEDLFYQSSLASWNYNTNITEENVQNMNNAGDKWSAFLKEQSTLAWMYPLQEIWDLGKGDFRGG |
| | | | GGSGGGGSIEEQAKTFLDKFNHEAEDLFYQSSLASWNYNTNITEENVQNMNNAGDKWSAFLKEQSTLAQMYPLQEIWDL |
| | | | GKGDFRGGGGSGGGGSEPKSCDKTHTCPPCPAPELLGGPSVFLFPPKPKDTLMISRTPEVTCVVVDVSHEDPEVKFNWY |
| | | | VDGVEVHNAKTKPREEQYNSTYRVVSVLTVLHQDWLNGKEYKCKVSNKALPAPIEKTISKAKGQPREPQVYTLPPSRDE |
| | | | LTKNQVSLTCLVKGFYPSDIAVEWESNGQPENNYKTTPPVLDSDGSFFLYSKLTVDKSRWQQGNVFSCSVMHEALHNHY |
| | | | TQKSLSLSPGKGGGGSGGGGSCMEALGMESGEIHSDQITASSQYSTNWSAERSRLNYPENGWTPGADSYREWIQVDLGL |
| | | | LRFVTAVGTQGAISKETKKKYYVKTYKIDVSSNGEDWITIKEGNKPVLFQGNTNPTDVVVAVFPKPLITRFVRIKPATW |
| | | | ETGISMRFEVYGCKITDYPCSGMLGMVSGLISDSQITSSNQGDRNWMPENIRLVTSRSGWALPPAPHSYINEWLQIDLG |
| | | | EEKIVRGIIIQGGKHRENKVFMRKFKIGYSNNGSDWKMIMDDSKRKAKSFEGNNNYDTPELRTFPALSTRFIRIYPERA |
| | | | THGGLGLRMELLGCGGGGSGGGGSCMEALGMESGEIHSDQITASSQYSTNWSAERSRLNYPENGWTPGADSYREWIQVD |
| | | | LGLLRFVTAVGTQGAISKETKKKYYVKTYKIDVSSNGEDWITIKEGNKPVLFQGNTNPTDVVVAVFPKPLITRFVRIKP |
| | | | ATWETGISMRFEVYGCKITDYPCSGMLGMVSGLISDSQITSSNQGDRNWMPENIRLVTSRSGWALPPAPHSYINEWLQI |
| | | | DLGEEKIVRGIIIQGGKHRENKVFMRKFKIGYSNNGSDWKMIMDDSKRKAKSFEGNNNYDTPELRTFPALSTRFIRIYP |
| | | | ERATHGGLGLRMELLGCEVEA |
| 9 | 62 | 1048 | IEEQAKTWLDKFNHEAEDLFYQSSLASWNYNTNITEENVQNMNNAGDKWSAFLKEQSTLAQMYPLQEIWDLGKGDFRGG |
| | | | GGSGGGGSIEEQAKTWLDKFNHEAEDLFYQSSLASWNYNTNITEENVQNMNNAGDKWSAFLKEQSTLAQMYPLQEIWDL |
| | | | GKGDFRGGGGSGGGGSEPKSCDKTHTCPPCPAPELLGGPSVFLFPPKPKDTLMISRTPEVTCVVVDVSHEDPEVKFNWY |
| | | | VDGVEVHNAKTKPREEQYNSTYRVVSVLTVLHQDWLNGKEYKCKVSNKALPAPIEKTISKAKGQPREPQVYTLPPSRDE |
| | | | LTKNQVSLTCLVKGFYPSDIAVEWESNGQPENNYKTTPPVLDSDGSFFLYSKLTVDKSRWQQGNVFSCSVMHEALHNHY |
| | | | TQKSLSLSPGKGGGGSGGGGSCMEALGMESGEIHSDQITASSQYSTNWSAERSRLNYPENGWTPGADSYREWIQVDLGL |
| | | | LRFVTAVGTQGAISKETKKKYYVKTYKIDVSSNGEDWITIKEGNKPVLFQGNTNPTDVVVAVFPKPLITRFVRIKPATW |
| | | | ETGISMRFEVYGCKITDYPCSGMLGMVSGLISDSQITSSNQGDRNWMPENIRLVTSRSGWALPPAPHSYINEWLQIDLG |
| | | | EEKIVRGIIIQGGKHRENKVFMRKFKIGYSNNGSDWKMIMDDSKRKAKSFEGNNNYDTPELRTFPALSTRFIRIYPERA |
| | | | THGGLGLRMELLGCGGGGSGGGGSCMEALGMESGEIHSDQITASSQYSTNWSAERSRLNYPENGWTPGADSYREWIQVD |
| | | | LGLLRFVTAVGTQGAISKETKKKYYVKTYKIDVSSNGEDWITIKEGNKPVLFQGNTNPTDVVVAVFPKPLITRFVRIKP |
| | | | ATWETGISMRFEVYGCKITDYPCSGMLGMVSGLISDSQITSSNQGDRNWMPENIRLVTSRSGWALPPAPHSYINEWLQI |
| | | | DLGEEKIVRGIIIQGGKHRENKVFMRKFKIGYSNNGSDWKMIMDDSKRKAKSFEGNNNYDTPELRTFPALSTRFIRIYP |
| | | | ERATHGGLGLRMELLGCEVEA |
| 10 | 63 | 1048 | IEEQAKTFLAKFNHEAEDLFYQSSLASWNYNTNITEENVQNMNNAGDKWSAFLKEQSTLAQMYPLQEIWDLGKGDFRGG |
| | | | GGSGGGGSIEEQAKTFLAKFNHEAEDLFYQSSLASWNYNTNITEENVQNMNNAGDKWSAFLKEQSTLAQMYPLQEIWDL |
| | | | GKGDFRGGGGSGGGGSEPKSCDKTHTCPPCPAPELLGGPSVFLFPPKPKDTLMISRTPEVTCVVVDVSHEDPEVKFNWY |
| | | | VDGVEVHNAKTKPREEQYNSTYRVVSVLTVLHQDWLNGKEYKCKVSNKALPAPIEKTISKAKGQPREPQVYTLPPSRDE |
| | | | LTKNQVSLTCLVKGFYPSDIAVEWESNGQPENNYKTTPPVLDSDGSFFLYSKLTVDKSRWQQGNVFSCSVMHEALHNHY |
| | | | TQKSLSLSPGKGGGGSGGGGSCMEALGMESGEIHSDQITASSQYSTNWSAERSRLNYPENGWTPGADSYREWIQVDLGL |
| | | | LRFVTAVGTQGAISKETKKKYYVKTYKIDVSSNGEDWITIKEGNKPVLFQGNTNPTDVVVAVFPKPLITRFVRIKPATW |
| | | | ETGISMRFEVYGCKITDYPCSGMLGMVSGLISDSQITSSNQGDRNWMPENIRLVTSRSGWALPPAPHSYINEWLQIDLG |
| | | | EEKIVRGIIIQGGKHRENKVFMRKFKIGYSNNGSDWKMIMDDSKRKAKSFEGNNNYDTPELRTFPALSTRFIRIYPERA |
| | | | THGGLGLRMELLGCGGGGSGGGGSCMEALGMESGEIHSDQITASSQYSTNWSAERSRLNYPENGWTPGADSYREWIQVD |
| | | | ATWETGISMRFEVYGCKITDYPCSGMLGMVSGLISDSQITSSNQGDRNWMPENIRLVTSRSGWALPPAPHSYINEWLQI |
| | | | DLGEEKIVRGIIIQGGKHRENKVFMRKFKIGYSNNGSDWKMIMDDSKRKAKSFEGNNNYDTPELRTFPALSTRFIRIYP |
| | | | ERATHGGLGLRMELLGCEVEA |
| 11 | 64 | 1048 | IEEQAKTFLDKFNHEAEDLFYQSSLASWNYNTNITEENVQNMNNAGDKWSAFLKEQSTTAQMYPLQEIWDLGKGDFRGG |
| | | | GGSGGGGSIEEQAKTFLDKFNHEAEDLFYQSSLASWNYNTNITEENVQNMNNAGDKWSAFLKEQSTTAQMYPLQEIWDL |
| | | | GKGDFRGGGGSGGGGSEPKSCDKTHTCPPCPAPELLGGPSVFLFPPKPKDTLMISRTPEVTCVVVDVSHEDPEVKFNWY |
| | | | VDGVEVHNAKTKPREEQYNSTYRVVSVLTVLHQDWLNGKEYKCKVSNKALPAPIEKTISKAKGQPREPQVYTLPPSRDE |
| | | | LTKNQVSLTCLVKGFYPSDIAVEWESNGQPENNYKTTPPVLDSDGSFFLYSKLTVDKSRWQQGNVFSCSVMHEALHNHY |
| | | | TQKSLSLSPGKGGGGSGGGGSCMEALGMESGEIHSDQITASSQYSTNWSAERSRLNYPENGWTPGADSYREWIQVDLGL |
| | | | LRFVTAVGTQGAISKETKKKYYVKTYKIDVSSNGEDWITIKEGNKPVLFQGNTNPTDVVVAVFPKPLITRFVRIKPATW |
| | | | ETGISMRFEVYGCKITDYPCSGMLGMVSGLISDSQITSSNQGDRNWMPENIRLVTSRSGWALPPAPHSYINEWLQIDLG |
| | | | EEKIVRGIIIQGGKHRENKVFMRKFKIGYSNNGSDWKMIMDDSKRKAKSFEGNNNYDTPELRTFPALSTRFIRIYPERA |
| | | | THGGLGLRMELLGCGGGGSGGGGSCMEALGMESGEIHSDQITASSQYSTNWSAERSRLNYPENGWTPGADSYREWIQVD |
| | | | LGLLRFVTAVGTQGAISKETKKKYYVKTYKIDVSSNGEDWITIKEGNKPVLFQGNTNPTDVVVAVFPKPLITRFVRIKP |
| | | | ATWETGISMRFEVYGCKITDYPCSGMLGMVSGLISDSQITSSNQGDRNWMPENIRLVTSRSGWALPPAPHSYINEWLQI |
| | | | DLGEEKIVRGIIIQGGKHRENKVFMRKFKIGYSNNGSDWKMIMDDSKRKAKSFEGNNNYDTPELRTFPALSTRFIRIYP |
| | | | ERATHGGLGLRMELLGCEVEA |
| 37 | 90 | 952 | CMEALGMESGEIHSDQITASSQYSTNWSAERSRLNYPENGWTPGEDSYREWIQVDLGLLRFVTAVGTQGAISKETKKKY |
| | | | YVKTYKIDVSSNGEDWITIKEGNKPVLFQGNTNPTDVVVAVFPKPLITRFVRIKPATWETGISMRFEVYGCKITDYPCS |
| | | | GMLGMVSGLISDSQITSSNQGDRNWMPENIRLVTSRSGWALPPAPHSYINEWLQIDLGEEKIVRGIIIQGGKHRENKVF |
| | | | MRKFKIGYSNNGSDWKMIMDDSKRKAKSFEGNNNYDTPELRTFPALSTRFIRIYPERATHGGLGLRMELLGCGGGGSGG |
| | | | GGSCMEALGMESGEIHSDQITASSQYSTNWSAERSRLNYPENGWTPGEDSYREWIQVDLGLLRFVTAVGTQGAISKETK |
| | | | KKYYVKTYKIDVSSNGEDWITIKEGNKPVLFQGNTNPTDVVVAVFPKPLITRFVRIKPATWETGISMRFEVYGCKITDY |
| | | | PCSGMLGMVSGLISDSQITSSNQGDRNWMPENIRLVTSRSGWALPPAPHSYINEWLQIDLGEEKIVRGIIIQGGKHREN |
| | | | KVFMRKFKIGYSNNGSDWKMIMDDSKRKAKSFEGNNNYDTPELRTFPALSTRFIRIYPERATHGGLGLRMELLGCGGGG |
| | | | SGGGGSEPKSCDKTHTCPPCPAPELLGGPSVFLFPPKPKDTLMISRTPEVTCVVVDVSHEDPEVKFNWYVDGVEVHNAK |
| | | | TKPREEQYNSTYRVVSVLAVLHQDWLNGKEYKCKVSNKALPAPIEKTISKAKGQPREPQVYTLPPSRDELTKNQVSLTC |
| | | | LVKGFYPSDIAVAWESNGQPENNYKTTPPVLDSDGSFFLYSKLTVDKSRWQQGNVFSCSVMHEALHAHYTQKSLSLSPG |
| | | | KGGGGSGGGGSEEQAKTFLDKFNHEAEDLFYQSSGLGKGDFRGGGGSGGGGSEEQAKTFLDKFNHEAEDLFYQSSGLGK |
| | | | GDFR |
| 38 | 91 | 1044 | CMEALGMESGEIHSDQITASSQYSTNWSAERSRLNYPENGWTPGEDSYREWIQVDLGLLRFVTAVGTQGAISKETKKKY |
| | | | YVKTYKIDVSSNGEDWITIKEGNKPVLFQGNTNPTDVVVAVFPKPLITRFVRIKPATWETGISMRFEVYGCKITDYPCS |
| | | | GMLGMVSGLISDSQITSSNQGDRNWMPENIRLVTSRSGWALPPAPHSYINEWLQIDLGEEKIVRGIIIQGGKHRENKVF |
| | | | MRKFKIGYSNNGSDWKMIMDDSKRKAKSFEGNNNYDTPELRTFPALSTRFIRIYPERATHGGLGLRMELLGCGGGGSGG |
| | | | GGSCMEALGMESGEIHSDQITASSQYSTNWSAERSRLNYPENGWTPGEDSYREWIQVDLGLLRFVTAVGTQGAISKETK |
| | | | KKYYVKTYKIDVSSNGEDWITIKEGNKPVLFQGNTNPTDVVVAVFPKPLITRFVRIKPATWETGISMRFEVYGCKITDY |
| | | | PCSGMLGMVSGLISDSQITSSNQGDRNWMPENIRLVTSRSGWALPPAPHSYINEWLQIDLGEEKIVRGIIIQGGKHREN |
| | | | KVFMRKFKIGYSNNGSDWKMIMDDSKRKAKSFEGNNNYDTPELRTFPALSTRFIRIYPERATHGGLGLRMELLGCGGGG |
| | | | SGGGGSEPKSCDKTHTCPPCPAPELLGGPSVFLFPPKPKDTLMISRTPEVTCVVVDVSHEDPEVKFNWYVDGVEVHNAK |
| | | | TKPREEQYNSTYRVVSVLAVLHQDWLNGKEYKCKVSNKALPAPIEKTISKAKGQPREPQVYTLPPSRDELTKNQVSLTC |
| | | | LVKGFYPSDIAVAWESNGQPENNYKTTPPVLDSDGSFFLYSKLTVDKSRWQQGNVFSCSVMHEALHAHYTQKSLSLSPG |
| | | | KGGGGSGGGGSIEEQAKTFLDKFNHEAEDLFYQSSLASWNYNTNITEENVQNMNNAGDKWSAFLKEQSTLAQMYPLQEI |
| | | | WDLGKGDFRGGGGSGGGGSIEEQAKTFLDKFNHEAEDLFYQSSLASWNYNTNITEENVQNMNNAGDKWSAFLKEQSTLA |
| | | | QMYPLQEIWDLGKGDFR |
| 39 | 92 | 952 | CMEALGMESGEIHSDQITASSQYSTNWSAERSRLNYPENGWTPGEDSYREWIQVDLGLLRFVTAVGTQGAISKETKKKY |
| | | | YVKTYKIDVSSNGEDWITIKEGNKPVLFQGNTNPTDVVVAVFPKPLITRFVRIKPATWETGISMRFEVYGCKITDYPCS |
| | | | GMLGMVSGLISDSQITSSNQGDRNWMPENIRLVTSRSGWALPPAPHSYINEWLQIDLGEEKIVRGIIIQGGKHRENKVF |
| | | | MRKFKIGYSNNGSDWKMIMDDSKRKAKSFEGNNNYDTPELRTFPALSTRFIRIYPERATHGGLGLRMELLGCGGGGSGG |
| | | | GGSCMEALGMESGEIHSDQITASSQYSTNWSAERSRLNYPENGWTPGEDSYREWIQVDLGLLRFVTAVGTQGAISKETK |
| | | | KKYYVKTYKIDVSSNGEDWITIKEGNKPVLFQGNTNPTDVVVAVFPKPLITRFVRIKPATWETGISMRFEVYGCKITDY |
| | | | PCSGMLGMVSGLISDSQITSSNQGDRNWMPENIRLVTSRSGWALPPAPHSYINEWLQIDLGEEKIVRGIIIQGGKHREN |
| | | | KVFMRKFKIGYSNNGSDWKMIMDDSKRKAKSFEGNNNYDTPELRTFPALSTRFIRIYPERATHGGLGLRMELLGCGGGG |
| | | | SGGGGSEPKSCDKTHTCPPCPAPELLGGPSVFLFPPKPKDTLMISRTPEVTCVVVDVSHEDPEVKFNWYVDGVEVHNAK |
| | | | TKPREEQYNSTYRVVSVLAVLHQDWLNGKEYKCKVSNKALPAPIEKTISKAKGQPREPQVYTLPPSRDELTKNQVSLTC |
| | | | LVKGFYPSDIAVAWESNGQPENNYKTTPPVLDSDGSFFLYSKLTVDKSRWQQGNVFSCSVMHEALHAHYTQKSLSLSPG |
| | | | KGGGGSGGGGSEEQAKTWLDKFNHEAEDLFYQSSGLGKGDFRGGGGSGGGGSEEQAKTWLDKFNHEAEDLFYQSSGLGK |
| | | | GDFR |
| 40 | 93 | 1044 | CMEALGMESGEIHSDQITASSQYSTNWSAERSRLNYPENGWTPGEDSYREWIQVDLGLLRFVTAVGTQGAISKETKKKY |
| | | | YVKTYKIDVSSNGEDWITIKEGNKPVLFQGNTNPTDVVVAVFPKPLITRFVRIKPATWETGISMRFEVYGCKITDYPCS |
| | | | GMLGMVSGLISDSQITSSNQGDRNWMPENIRLVTSRSGWALPPAPHSYINEWLQIDLGEEKIVRGIIIQGGKHRENKVF |
| | | | MRKFKIGYSNNGSDWKMIMDDSKRKAKSFEGNNNYDTPELRTFPALSTRFIRIYPERATHGGLGLRMELLGCGGGGSGG |
| | | | GGSCMEALGMESGEIHSDQITASSQYSTNWSAERSRLNYPENGWTPGEDSYREWIQVDLGLLRFVTAVGTQGAISKETK |
| | | | KKYYVKTYKIDVSSNGEDWITIKEGNKPVLFQGNTNPTDVVVAVFPKPLITRFVRIKPATWETGISMRFEVYGCKITDY |
| | | | PCSGMLGMVSGLISDSQITSSNQGDRNWMPENIRLVTSRSGWALPPAPHSYINEWLQIDLGEEKIVRGIIIQGGKHREN |
| | | | KVFMRKFKIGYSNNGSDWKMIMDDSKRKAKSFEGNNNYDTPELRTFPALSTRFIRIYPERATHGGLGLRMELLGCGGGG |
| | | | SGGGGSEPKSCDKTHTCPPCPAPELLGGPSVFLFPPKPKDTLMISRTPEVTCVVVDVSHEDPEVKFNWYVDGVEVHNAK |
| | | | TKPREEQYNSTYRVVSVLAVLHQDWLNGKEYKCKVSNKALPAPIEKTISKAKGQPREPQVYTLPPSRDELTKNQVSLTC |
| | | | LVKGFYPSDIAVAWESNGQPENNYKTTPPVLDSDGSFFLYSKLTVDKSRWQQGNVFSCSVMHEALHAHYTQKSLSLSPG |
| | | | KGGGGSGGGGSIEEQAKTWLDKFNHEAEDLFYQSSLASWNYNTNITEENVQNMNNAGDKWSAFLKEQSTLAQMYPLQEI |
| | | | WDLGKGDFRGGGGSGGGGSIEEQAKTWLDKFNHEAEDLFYQSSLASWNYNTNITEENVQNMNNAGDKWSAFLKEQSTLA |
| | | | QMYPLQEIWDLGKGDFR |
| 41 | 94 | 1044 | CMEALGMESGEIHSDQITASSQYSTNWSAERSRLNYPENGWTPGADSYREWIQVDLGLLRFVTAVGTQGAISKETKKKY |
| | | | YVKTYKIDVSSNGEDWITIKEGNKPVLFQGNTNPTDVVVAVFPKPLITRFVRIKPATWETGISMRFEVYGCKITDYPCS |
| | | | GMLGMVSGLISDSQITSSNQGDRNWMPENIRLVTSRSGWALPPAPHSYINEWLQIDLGEEKIVRGIIIQGGKHRENKVF |
| | | | MRKFKIGYSNNGSDWKMIMDDSKRKAKSFEGNNNYDTPELRTFPALSTRFIRIYPERATHGGLGLRMELLGCGGGGSGG |
| | | | GGSCMEALGMESGEIHSDQITASSQYSTNWSAERSRLNYPENGWTPGADSYREWIQVDLGLLRFVTAVGTQGAISKETK |
| | | | KKYYVKTYKIDVSSNGEDWITIKEGNKPVLFQGNTNPTDVVVAVFPKPLITRFVRIKPATWETGISMRFEVYGCKITDY |
| | | | PCSGMLGMVSGLISDSQITSSNQGDRNWMPENIRLVTSRSGWALPPAPHSYINEWLQIDLGEEKIVRGIIIQGGKHREN |
| | | | KVFMRKFKIGYSNNGSDWKMIMDDSKRKAKSFEGNNNYDTPELRTFPALSTRFIRIYPERATHGGLGLRMELLGCGGGG |
| | | | SGGGGSEPKSCDKTHTCPPCPAPELLGGPSVFLFPPKPKDTLMISRTPEVTCVVVDVSHEDPEVKFNWYVDGVEVHNAK |
| | | | TKPREEQYNSTYRVVSVLAVLHQDWLNGKEYKCKVSNKALPAPIEKTISKAKGQPREPQVYTLPPSRDELTKNQVSLTC |
| | | | LVKGFYPSDIAVAWESNGQPENNYKTTPPVLDSDGSFFLYSKLTVDKSRWQQGNVFSCSVMHEALHAHYTQKSLSLSPG |
| | | | KGGGGSGGGGSIEEQAKTFLDKFNHEAEDLFYQSSLASWNYNTNITEENVQNMNNAGDKWSAFLKEQSTLAQMYPLQEI |
| | | | WDLGKGDFRGGGGSGGGGSIEEQAKTFLDKFNHEAEDLFYQSSLASWNYNTNITEENVQNMNNAGDKWSAFLKEQSTLA |
| | | | QMYPLQEIWDLGKGDFR |
| 42 | 95 | 1044 | CMEALGMESGEIHSDQITASSQYSTNWSAERSRLNYPENGWTPGADSYREWIQVDLGLLRFVTAVGTQGAISKETKKKY |
| | | | YVKTYKIDVSSNGEDWITIKEGNKPVLFQGNTNPTDVVVAVFPKPLITRFVRIKPATWETGISMRFEVYGCKITDYPCS |
| | | | GMLGMVSGLISDSQITSSNQGDRNWMPENIRLVTSRSGWALPPAPHSYINEWLQIDLGEEKIVRGIIIQGGKHRENKVF |
| | | | MRKFKIGYSNNGSDWKMIMDDSKRKAKSFEGNNNYDTPELRTFPALSTRFIRIYPERATHGGLGLRMELLGCGGGGSGG |
| | | | GGSCMEALGMESGEIHSDQITASSQYSTNWSAERSRLNYPENGWTPGADSYREWIQVDLGLLRFVTAVGTQGAISKETK |
| | | | KKYYVKTYKIDVSSNGEDWITIKEGNKPVLFQGNTNPTDVVVAVFPKPLITRFVRIKPATWETGISMRFEVYGCKITDY |
| | | | PCSGMLGMVSGLISDSQITSSNQGDRNWMPENIRLVTSRSGWALPPAPHSYINEWLQIDLGEEKIVRGIIIQGGKHREN |
| | | | KVFMRKFKIGYSNNGSDWKMIMDDSKRKAKSFEGNNNYDTPELRTFPALSTRFIRIYPERATHGGLGLRMELLGCGGGG |
| | | | SGGGGSEPKSCDKTHTCPPCPAPELLGGPSVFLFPPKPKDTLMISRTPEVTCVVVDVSHEDPEVKFNWYVDGVEVHNAK |
| | | | TKPREEQYNSTYRVVSVLAVLHQDWLNGKEYKCKVSNKALPAPIEKTISKAKGQPREPQVYTLPPSRDELTKNQVSLTC |
| | | | LVKGFYPSDIAVAWESNGQPENNYKTTPPVLDSDGSFFLYSKLTVDKSRWQQGNVFSCSVMHEALHAHYTQKSLSLSPG |
| | | | KGGGGSGGGGSIEEQAKTWLDKFNHEAEDLFYQSSLASWNYNTNITEENVQNMNNAGDKWSAFLKEQSTLAQMYPLQEI |
| | | | WDLGKGDFRGGGGSGGGGSIEEQAKTWLDKFNHEAEDLFYQSSLASWNYNTNITEENVQNMNNAGDKWSAFLKEQSTLA |
| | | | QMYPLQEIWDLGKGDFR |
| 43 | 96 | 1044 | CMEALGMESGEIHSDQITASSQYSTNWSAERSRLNYPENGWTPGADSYREWIQVDLGLLRFVTAVGTQGAISKETKKKY |
| | | | YVKTYKIDVSSNGEDWITIKEGNKPVLFQGNTNPTDVVVAVFPKPLITRFVRIKPATWETGISMRFEVYGCKITDYPCS |
| | | | GMLGMVSGLISDSQITSSNQGDRNWMPENIRLVTSRSGWALPPAPHSYINEWLQIDLGEEKIVRGIIIQGGKHRENKVF |
| | | | MRKFKIGYSNNGSDWKMIMDDSKRKAKSFEGNNNYDTPELRTFPALSTRFIRIYPERATHGGLGLRMELLGCGGGGSGG |
| | | | GGSCMEALGMESGEIHSDQITASSQYSTNWSAERSRLNYPENGWTPGADSYREWIQVDLGLLRFVTAVGTQGAISKETK |
| | | | KKYYVKTYKIDVSSNGEDWITIKEGNKPVLFQGNTNPTDVVVAVFPKPLITRFVRIKPATWETGISMRFEVYGCKITDY |
| | | | PCSGMLGMVSGLISDSQITSSNQGDRNWMPENIRLVTSRSGWALPPAPHSYINEWLQIDLGEEKIVRGIIIQGGKHREN |
| | | | KVFMRKFKIGYSNNGSDWKMIMDDSKRKAKSFEGNNNYDTPELRTFPALSTRFIRIYPERATHGGLGLRMELLGCGGGG |
| | | | SGGGGSEPKSCDKTHTCPPCPAPELLGGPSVFLFPPKPKDTLMISRTPEVTCVVVDVSHEDPEVKFNWYVDGVEVHNAK |
| | | | TKPREEQYNSTYRVVSVLAVLHQDWLNGKEYKCKVSNKALPAPIEKTISKAKGQPREPQVYTLPPSRDELTKNQVSLTC |
| | | | LVKGFYPSDIAVAWESNGQPENNYKTTPPVLDSDGSFFLYSKLTVDKSRWQQGNVFSCSVMHEALHAHYTQKSLSLSPG |
| | | | KGGGGSGGGGSIEEQAKTFLAKFNHEAEDLFYQSSLASWNYNTNITEENVQNMNNAGDKWSAFLKEQSTLAQMYPLQEI |
| | | | WDLGKGDFRGGGGSGGGGSIEEQAKTFLAKFNHEAEDLFYQSSLASWNYNTNITEENVQNMNNAGDKWSAFLKEQSTLA |
| | | | QMYPLQEIWDLGKGDFR |
| 44 | 97 | 1044 | CMEALGMESGEIHSDQITASSQYSTNWSAERSRLNYPENGWTPGADSYREWIQVDLGLLRFVTAVGTQGAISKETKKKY |
| | | | YVKTYKIDVSSNGEDWITIKEGNKPVLFQGNTNPTDVVVAVFPKPLITRFVRIKPATWETGISMRFEVYGCKITDYPCS |
| | | | GMLGMVSGLISDSQITSSNQGDRNWMPENIRLVTSRSGWALPPAPHSYINEWLQIDLGEEKIVRGIIIQGGKHRENKVF |
| | | | MRKFKIGYSNNGSDWKMIMDDSKRKAKSFEGNNNYDTPELRTFPALSTRFIRIYPERATHGGLGLRMELLGCGGGGSGG |
| | | | GGSCMEALGMESGEIHSDQITASSQYSTNWSAERSRLNYPENGWTPGADSYREWIQVDLGLLRFVTAVGTQGAISKETK |
| | | | KKYYVKTYKIDVSSNGEDWITIKEGNKPVLFQGNTNPTDVVVAVFPKPLITRFVRIKPATWETGISMRFEVYGCKITDY |
| | | | PCSGMLGMVSGLISDSQITSSNQGDRNWMPENIRLVTSRSGWALPPAPHSYINEWLQIDLGEEKIVRGIIIQGGKHREN |
| | | | KVFMRKFKIGYSNNGSDWKMIMDDSKRKAKSFEGNNNYDTPELRTFPALSTRFIRIYPERATHGGLGLRMELLGCGGGG |
| | | | SGGGGSEPKSCDKTHTCPPCPAPELLGGPSVFLFPPKPKDTLMISRTPEVTCVVVDVSHEDPEVKFNWYVDGVEVHNAK |
| | | | TKPREEQYNSTYRVVSVLAVLHQDWLNGKEYKCKVSNKALPAPIEKTISKAKGQPREPQVYTLPPSRDELTKNQVSLTC |
| | | | LVKGFYPSDIAVAWESNGQPENNYKTTPPVLDSDGSFFLYSKLTVDKSRWQQGNVFSCSVMHEALHAHYTQKSLSLSPG |
| | | | KGGGGSGGGGSIEEQAKTFLDKFNHEAEDLFYQSSLASWNYNTNITEENVQNMNNAGDKWSAFLKEQSTTAQMYPLQEI |
| | | | WDLGKGDFRGGGGSGGGGSIEEQAKTFLDKFNHEAEDLFYQSSLASWNYNTNITEENVQNMNNAGDKWSAFLKEQSTTA |
| | | | QMYPLQEIWDLGKGDFR |
| 45 | 98 | 1058 | CNVPLGMESGRIANEQISASSTYSDGRWTPQQSRLHGDDNGWTPNLDSNKEYLQVDLRFLTMLTAIATQGAISRETQNG |
| | | | YYVKSYKLEVSTNGEDWMVYRHGKNHKVFQANNDATEVVLNKLHAPLLTRFVRIRPQTWHSGIALRLELFGCRVTDAPC |
| | | | SNMLGMLSGLIADSQISASSTQEYLWSPSAARLVSSRSGWFPRIPQAQPGEEWLQVDLGTPKTVKGVIIQGARGGDSIT |
| | | | AVEARAFVRKFKVSYSLNGKDWEYIQDPRTQQPKLFEGNMHYDTPDIRRFDPIPAQYVRVYPERWSPAGIGMRLEVLGC |
| | | | GGGGSGGGGSCNVPLGMESGRIANEQISASSTYSDGRWTPQQSRLHGDDNGWTPNLDSNKEYLQVDLRFLTMLTAIATQ |
| | | | GAISRETQNGYYVKSYKLEVSTNGEDWMVYRHGKNHKVFQANNDATEVVLNKLHAPLLTRFVRIRPQTWHSGIALRLEL |
| | | | FGCRVTDAPCSNMLGMLSGLIADSQISASSTQEYLWSPSAARLVSSRSGWFPRIPQAQPGEEWLQVDLGTPKTVKGVII |
| | | | QGARGGDSITAVEARAFVRKFKVSYSLNGKDWEYIQDPRTQQPKLFEGNMHYDTPDIRRFDPIPAQYVRVYPERWSPAG |
| | | | IGMRLEVLGCGGGGSGGGGSEPKSCDKTHTCPPCPAPELLGGPSVFLFPPKPKDTLMISRTPEVTCVVVDVSHEDPEVK |
| | | | FNWYVDGVEVHNAKTKPREEQYNSTYRVVSVLAVLHQDWLNGKEYKCKVSNKALPAPIEKTISKAKGQPREPQVYTLPP |
| | | | SRDELTKNQVSLTCLVKGFYPSDIAVAWESNGQPENNYKTTPPVLDSDGSFFLYSKLTVDKSRWQQGNVFSCSVMHEAL |
| | | | HAHYTQKSLSLSPGKGGGGSGGGGSIEEQAKTFLDKFNHEAEDLFYQSSLASWNYNTNITEENVQNMNNAGDKWSAFLK |
| | | | EQSTLAQMYPLQEIWDLGKGDFRGGGGSGGGGSIEEQAKTFLDKFNHEAEDLFYQSSLASWNYNTNITEENVQNMNNAG |
| | | | DKWSAFLKEQSTLAQMYPLQEIWDLGKGDFR |
| 46 | 99 | 952 | CMEALGMESGEIHSDQITASSQYSTNWSAERSRLNYPENGWTPGEDSYREWIQVDLGLLRFVTAVGTQGAISKETKKKY |
| | | | YVKTYKIDVSSNGEDWITIKEGNKPVLFQGNTNPTDVVVAVFPKPLITRFVRIKPATWETGISMRFEVYGCKITDYPCS |
| | | | GMLGMVSGLISDSQITSSNQGDRNWMPENIRLVTSRSGWALPPAPHSYINEWLQIDLGEEKIVRGIIIQGGKHRENKVF |
| | | | MRKFKIGYSNNGSDWKMIMDDSKRKAKSFEGNNNYDTPELRTFPALSTRFIRIYPERATHGGLGLRMELLGCGGGGSGG |
| | | | GGSCMEALGMESGEIHSDQITASSQYSTNWSAERSRLNYPENGWTPGEDSYREWIQVDLGLLRFVTAVGTQGAISKETK |
| | | | KKYYVKTYKIDVSSNGEDWITIKEGNKPVLFQGNTNPTDVVVAVFPKPLITRFVRIKPATWETGISMRFEVYGCKITDY |
| | | | PCSGMLGMVSGLISDSQITSSNQGDRNWMPENIRLVTSRSGWALPPAPHSYINEWLQIDLGEEKIVRGIIIQGGKHREN |
| | | | KVFMRKFKIGYSNNGSDWKMIMDDSKRKAKSFEGNNNYDTPELRTFPALSTRFIRIYPERATHGGLGLRMELLGCGGGG |
| | | | SGGGGSEPKSCDKTHTCPPCPAPELLGGPSVFLFPPKPKDTLMISRTPEVTCVVVDVSHEDPEVKFNWYVDGVEVHNAK |
| | | | TKPREEQYNSTYRVVSVLTVLHQDWLNGKEYKCKVSNKALPAPIEKTISKAKGQPREPQVYTLPPSRDELTKNQVSLTC |
| | | | LVKGFYPSDIAVEWESNGQPENNYKTTPPVLDSDGSFFLYSKLTVDKSRWQQGNVFSCSVMHEALHNHYTQKSLSLSPG |
| | | | KGGGGSGGGGSEEQAKTFLDKFNHEAEDLFYQSSGLGKGDFRGGGGSGGGGSEEQAKTFLDKFNHEAEDLFYQSSGLGK |
| | | | GDFR |
| 47 | 100 | 1044 | CMEALGMESGEIHSDQITASSQYSTNWSAERSRLNYPENGWTPGEDSYREWIQVDLGLLRFVTAVGTQGAISKETKKKY |
| | | | YVKTYKIDVSSNGEDWITIKEGNKPVLFQGNTNPTDVVVAVFPKPLITRFVRIKPATWETGISMRFEVYGCKITDYPCS |
| | | | GMLGMVSGLISDSQITSSNQGDRNWMPENIRLVTSRSGWALPPAPHSYINEWLQIDLGEEKIVRGIIIQGGKHRENKVF |
| | | | MRKFKIGYSNNGSDWKMIMDDSKRKAKSFEGNNNYDTPELRTFPALSTRFIRIYPERATHGGLGLRMELLGCGGGGSGG |
| | | | GGSCMEALGMESGEIHSDQITASSQYSTNWSAERSRLNYPENGWTPGEDSYREWIQVDLGLLRFVTAVGTQGAISKETK |
| | | | KKYYVKTYKIDVSSNGEDWITIKEGNKPVLFQGNTNPTDVVVAVFPKPLITRFVRIKPATWETGISMRFEVYGCKITDY |
| | | | PCSGMLGMVSGLISDSQITSSNQGDRNWMPENIRLVTSRSGWALPPAPHSYINEWLQIDLGEEKIVRGIIIQGGKHREN |
| | | | KVFMRKFKIGYSNNGSDWKMIMDDSKRKAKSFEGNNNYDTPELRTFPALSTRFIRIYPERATHGGLGLRMELLGCGGGG |
| | | | SGGGGSEPKSCDKTHTCPPCPAPELLGGPSVFLFPPKPKDTLMISRTPEVTCVVVDVSHEDPEVKFNWYVDGVEVHNAK |
| | | | TKPREEQYNSTYRVVSVLTVLHQDWLNGKEYKCKVSNKALPAPIEKTISKAKGQPREPQVYTLPPSRDELTKNQVSLTC |
| | | | LVKGFYPSDIAVEWESNGQPENNYKTTPPVLDSDGSFFLYSKLTVDKSRWQQGNVFSCSVMHEALHNHYTQKSLSLSPG |
| | | | KGGGGSGGGGSIEEQAKTFLDKFNHEAEDLFYQSSLASWNYNTNITEENVQNMNNAGDKWSAFLKEQSTLAQMYPLQEI |
| | | | WDLGKGDFRGGGGSGGGGSIEEQAKTFLDKFNHEAEDLFYQSSLASWNYNTNITEENVQNMNNAGDKWSAFLKEQSTLA |
| | | | QMYPLQEIWDLGKGDFR |
| 48 | 101 | 1044 | CMEALGMESGEIHSDQITASSQYSTNWSAERSRLNYPENGWTPGEDSYREWIQVDLGLLRFVTAVGTQGAISKETKKKY |
| | | | YVKTYKIDVSSNGEDWITIKEGNKPVLFQGNTNPTDVVVAVFPKPLITRFVRIKPATWETGISMRFEVYGCKITDYPCS |
| | | | GMLGMVSGLISDSQITSSNQGDRNWMPENIRLVTSRSGWALPPAPHSYINEWLQIDLGEEKIVRGIIIQGGKHRENKVF |
| | | | MRKFKIGYSNNGSDWKMIMDDSKRKAKSFEGNNNYDTPELRTFPALSTRFIRIYPERATHGGLGLRMELLGCGGGGSGG |
| | | | GGSCMEALGMESGEIHSDQITASSQYSTNWSAERSRLNYPENGWTPGEDSYREWIQVDLGLLRFVTAVGTQGAISKETK |
| | | | KKYYVKTYKIDVSSNGEDWITIKEGNKPVLFQGNTNPTDVVVAVFPKPLITRFVRIKPATWETGISMRFEVYGCKITDY |
| | | | PCSGMLGMVSGLISDSQITSSNQGDRNWMPENIRLVTSRSGWALPPAPHSYINEWLQIDLGEEKIVRGIIIQGGKHREN |
| | | | KVFMRKFKIGYSNNGSDWKMIMDDSKRKAKSFEGNNNYDTPELRTFPALSTRFIRIYPERATHGGLGLRMELLGCGGGG |
| | | | SGGGGSEPKSCDKTHTCPPCPAPELLGGPSVFLFPPKPKDTLMISRTPEVTCVVVDVSHEDPEVKFNWYVDGVEVHNAK |
| | | | TKPREEQYASTYRVVSVLTVLHQDWLNGKEYKCKVSNKALPAPIEKTISKAKGQPREPQVYTLPPSRDELTKNQVSLTC |
| | | | LVKGFYPSDIAVEWESNGQPENNYKTTPPVLDSDGSFFLYSKLTVDKSRWQQGNVFSCSVMHEALHNHYTQKSLSLSPG |
| | | | KGGGGSGGGGSIEEQAKTFLDKFNHEAEDLFYQSSLASWNYNTNITEENVQNMNNAGDKWSAFLKEQSTLAQMYPLQEI |
| | | | WDLGKGDFRGGGGSGGGGSIEEQAKTFLDKFNHEAEDLFYQSSLASWNYNTNITEENVQNMNNAGDKWSAFLKEQSTLA |
| | | | QMYPLQEIWDLGKGDFR |
| 49 | 102 | 1044 | CMEALGMESGEIHSDQITASSQYSTNWSAERSRLNYPENGWTPGEDSYREWIQVDLGLLRFVTAVGTQGAISKETKKKY |
| | | | YVKTYKIDVSSNGEDWITIKEGNKPVLFQGNTNPTDVVVAVFPKPLITRFVRIKPATWETGISMRFEVYGCKITDYPCS |
| | | | GMLGMVSGLISDSQITSSNQGDRNWMPENIRLVTSRSGWALPPAPHSYINEWLQIDLGEEKIVRGIIIQGGKHRENKVF |
| | | | MRKFKIGYSNNGSDWKMIMDDSKRKAKSFEGNNNYDTPELRTFPALSTRFIRIYPERATHGGLGLRMELLGCGGGGSGG |
| | | | GGSCMEALGMESGEIHSDQITASSQYSTNWSAERSRLNYPENGWTPGEDSYREWIQVDLGLLRFVTAVGTQGAISKETK |
| | | | KKYYVKTYKIDVSSNGEDWITIKEGNKPVLFQGNTNPTDVVVAVFPKPLITRFVRIKPATWETGISMRFEVYGCKITDY |
| | | | PCSGMLGMVSGLISDSQITSSNQGDRNWMPENIRLVTSRSGWALPPAPHSYINEWLQIDLGEEKIVRGIIIQGGKHREN |
| | | | KVFMRKFKIGYSNNGSDWKMIMDDSKRKAKSFEGNNNYDTPELRTFPALSTRFIRIYPERATHGGLGLRMELLGCGGGG |
| | | | SGGGGSEPKSCDKTHTCPPCPAPEAAGGPSVFLFPPKPKDTLMISRTPEVTCVVVDVSHEDPEVKFNWYVDGVEVHNAK |
| | | | TKPREEQYNSTYRVVSVLTVLHQDWLNGKEYKCKVSNKALPAPIEKTISKAKGQPREPQVYTLPPSRDELTKNQVSLTC |
| | | | LVKGFYPSDIAVEWESNGQPENNYKTTPPVLDSDGSFFLYSKLTVDKSRWQQGNVFSCSVMHEALHNHYTQKSLSLSPG |
| | | | KGGGGSGGGGSIEEQAKTFLDKFNHEAEDLFYQSSLASWNYNTNITEENVQNMNNAGDKWSAFLKEQSTLAQMYPLQEI |
| | | | WDLGKGDFRGGGGSGGGGSIEEQAKTFLDKFNHEAEDLFYQSSLASWNYNTNITEENVQNMNNAGDKWSAFLKEQSTLA |
| | | | QMYPLQEIWDLGKGDFR |
| 50 | 103 | 911 | CMEALGMESGEIHSDQITASSQYSTNWSAERSRLNYPENGWTPGEDSYREWIQVDLGLLRFVTAVGTQGAISKETKKKY |
| | | | YVKTYKIDVSSNGEDWITIKEGNKPVLFQGNTNPTDVVVAVFPKPLITRFVRIKPATWETGISMRFEVYGCKITDYPCS |
| | | | GMLGMVSGLISDSQITSSNQGDRNWMPENIRLVTSRSGWALPPAPHSYINEWLQIDLGEEKIVRGIIIQGGKHRENKVF |
| | | | MRKFKIGYSNNGSDWKMIMDDSKRKAKSFEGNNNYDTPELRTFPALSTRFIRIYPERATHGGLGLRMELLGCGGGGSGG |
| | | | GGSCMEALGMESGEIHSDQITASSQYSTNWSAERSRLNYPENGWTPGEDSYREWIQVDLGLLRFVTAVGTQGAISKETK |
| | | | KKYYVKTYKIDVSSNGEDWITIKEGNKPVLFQGNTNPTDVVVAVFPKPLITRFVRIKPATWETGISMRFEVYGCKITDY |
| | | | PCSGMLGMVSGLISDSQITSSNQGDRNWMPENIRLVTSRSGWALPPAPHSYINEWLQIDLGEEKIVRGIIIQGGKHREN |
| | | | KVFMRKFKIGYSNNGSDWKMIMDDSKRKAKSFEGNNNYDTPELRTFPALSTRFIRIYPERATHGGLGLRMELLGCGGGG |
| | | | SGGGGSEPKSCDKTHTCPPCPAPELLGGPSVFLFPPKPKDTLMISRTPEVTCVVVDVSHEDPEVKFNWYVDGVEVHNAK |
| | | | TKPREEQYNSTYRVVSVLTVLHQDWLNGKEYKCKVSNKALPAPIEKTISKAKGQPREPQVYTLPPSRDELTKNQVSLTC |
| | | | LVKGFYPSDIAVEWESNGQPENNYKTTPPVLDSDGSFFLYSKLTVDKSRWQQGNVFSCSVMHEALHNHYTQKSLSLSPG |
| | | | KGGGGSGGGGSEEQAKTFLDKFNHEAEDLFYQSSGLGKGDFR |
| 51 | 104 | 957 | CMEALGMESGEIHSDQITASSQYSTNWSAERSRLNYPENGWTPGEDSYREWIQVDLGLLRFVTAVGTQGAISKETKKKY |
| | | | YVKTYKIDVSSNGEDWITIKEGNKPVLFQGNTNPTDVVVAVFPKPLITRFVRIKPATWETGISMRFEVYGCKITDYPCS |
| | | | GMLGMVSGLISDSQITSSNQGDRNWMPENIRLVTSRSGWALPPAPHSYINEWLQIDLGEEKIVRGIIIQGGKHRENKVF |
| | | | MRKFKIGYSNNGSDWKMIMDDSKRKAKSFEGNNNYDTPELRTFPALSTRFIRIYPERATHGGLGLRMELLGCGGGGSGG |
| | | | GGSCMEALGMESGEIHSDQITASSQYSTNWSAERSRLNYPENGWTPGEDSYREWIQVDLGLLRFVTAVGTQGAISKETK |
| | | | KKYYVKTYKIDVSSNGEDWITIKEGNKPVLFQGNTNPTDVVVAVFPKPLITRFVRIKPATWETGISMRFEVYGCKITDY |
| | | | PCSGMLGMVSGLISDSQITSSNQGDRNWMPENIRLVTSRSGWALPPAPHSYINEWLQIDLGEEKIVRGIIIQGGKHREN |
| | | | KVFMRKFKIGYSNNGSDWKMIMDDSKRKAKSFEGNNNYDTPELRTFPALSTRFIRIYPERATHGGLGLRMELLGCGGGG |
| | | | SGGGGSEPKSCDKTHTCPPCPAPELLGGPSVFLFPPKPKDTLMISRTPEVTCVVVDVSHEDPEVKFNWYVDGVEVHNAK |
| | | | TKPREEQYNSTYRVVSVLTVLHQDWLNGKEYKCKVSNKALPAPIEKTISKAKGQPREPQVYTLPPSRDELTKNQVSLTC |
| | | | LVKGFYPSDIAVEWESNGQPENNYKTTPPVLDSDGSFFLYSKLTVDKSRWQQGNVFSCSVMHEALHNHYTQKSLSLSPG |
| | | | KGGGGSGGGGSIEEQAKTFLDKFNHEAEDLFYQSSLASWNYNTNITEENVQNMNNAGDKWSAFLKEQSTLAQMYPLQEI |
| | | | WDLGKGDFR |
| 52 | 105 | 1044 | CMEALGMESGEIHSDQITASSQYSTNWSAERSRLNYPENGWTPGEDSYREWIQVDLGLLRFVTAVGTQGAISKETKKKY |
| | | | YVKTYKIDVSSNGEDWITIKEGNKPVLFQGNTNPTDVVVAVFPKPLITRFVRIKPATWETGISMRFEVYGCKITDYPCS |
| | | | GMLGMVSGLISDSQITSSNQGDRNWMPENIRLVTSRSGWALPPAPHSYINEWLQIDLGEEKIVRGIIIQGGKHRENKVF |
| | | | MRKFKIGYSNNGSDWKMIMDDSKRKAKSFEGNNNYDTPELRTFPALSTRFIRIYPERATHGGLGLRMELLGCGGGGSGG |
| | | | GGSCMEALGMESGEIHSDQITASSQYSTNWSAERSRLNYPENGWTPGEDSYREWIQVDLGLLRFVTAVGTQGAISKETK |
| | | | KKYYVKTYKIDVSSNGEDWITIKEGNKPVLFQGNTNPTDVVVAVFPKPLITRFVRIKPATWETGISMRFEVYGCKITDY |
| | | | PCSGMLGMVSGLISDSQITSSNQGDRNWMPENIRLVTSRSGWALPPAPHSYINEWLQIDLGEEKIVRGIIIQGGKHREN |
| | | | KVFMRKFKIGYSNNGSDWKMIMDDSKRKAKSFEGNNNYDTPELRTFPALSTRFIRIYPERATHGGLGLRMELLGCGGGG |
| | | | SGGGGSEPKSCDKTHTCPPCPAPELLGGPSVFLFPPKPKDTLMISRTPEVTCVVVDVSHEDPEVKFNWYVDGVEVHNAK |
| | | | TKPREEQYASTYRVVSVLAVLHQDWLNGKEYKCKVSNKALPAPIEKTISKAKGQPREPQVYTLPPSRDELTKNQVSLTC |
| | | | LVKGFYPSDIAVAWESNGQPENNYKTTPPVLDSDGSFFLYSKLTVDKSRWQQGNVFSCSVMHEALHAHYTQKSLSLSPG |
| | | | KGGGGSGGGGSIEEQAKTFLDKFNHEAEDLFYQSSLASWNYNTNITEENVQNMNNAGDKWSAFLKEQSTLAQMYPLQEI |
| | | | WDLGKGDFRGGGGSGGGGSIEEQAKTFLDKFNHEAEDLFYQSSLASWNYNTNITEENVQNMNNAGDKWSAFLKEQSTLA |
| | | | QMYPLQEIWDLGKGDFR |
| 53 | 106 | 1044 | CMEALGMESGEIHSDQITASSQYSTNWSAERSRLNYPENGWTPGEDSYREWIQVDLGLLRFVTAVGTQGAISKETKKKY |
| | | | YVKTYKIDVSSNGEDWITIKEGNKPVLFQGNTNPTDVVVAVFPKPLITRFVRIKPATWETGISMRFEVYGCKITDYPCS |
| | | | GMLGMVSGLISDSQITSSNQGDRNWMPENIRLVTSRSGWALPPAPHSYINEWLQIDLGEEKIVRGIIIQGGKHRENKVF |
| | | | MRKFKIGYSNNGSDWKMIMDDSKRKAKSFEGNNNYDTPELRTFPALSTRFIRIYPERATHGGLGLRMELLGCGGGGSGG |
| | | | GGSCMEALGMESGEIHSDQITASSQYSTNWSAERSRLNYPENGWTPGEDSYREWIQVDLGLLRFVTAVGTQGAISKETK |
| | | | KKYYVKTYKIDVSSNGEDWITIKEGNKPVLFQGNTNPTDVVVAVFPKPLITRFVRIKPATWETGISMRFEVYGCKITDY |
| | | | PCSGMLGMVSGLISDSQITSSNQGDRNWMPENIRLVTSRSGWALPPAPHSYINEWLQIDLGEEKIVRGIIIQGGKHREN |
| | | | KVFMRKFKIGYSNNGSDWKMIMDDSKRKAKSFEGNNNYDTPELRTFPALSTRFIRIYPERATHGGLGLRMELLGCGGGG |
| | | | SGGGGSEPKSCDKTHTCPPCPAPEAAGGPSVFLFPPKPKDTLMISRTPEVTCVVVDVSHEDPEVKFNWYVDGVEVHNAK |
| | | | TKPREEQYNSTYRVVSVLAVLHQDWLNGKEYKCKVSNKALPAPIEKTISKAKGQPREPQVYTLPPSRDELTKNQVSLTC |
| | | | LVKGFYPSDIAVAWESNGQPENNYKTTPPVLDSDGSFFLYSKLTVDKSRWQQGNVFSCSVMHEALHAHYTQKSLSLSPG |
| | | | KGGGGSGGGGSIEEQAKTFLDKFNHEAEDLFYQSSLASWNYNTNITEENVQNMNNAGDKWSAFLKEQSTLAQMYPLQEI |
| | | | WDLGKGDFRGGGGSGGGGSIEEQAKTFLDKFNHEAEDLFYQSSLASWNYNTNITEENVQNMNNAGDKWSAFLKEQSTLA |
| | | | QMYPLQEIWDLGKGDFR |
| 54 | 107 | 1044 | CMEALGMESGEIHSDQITASSQYSTNWSAERSRLNYPENGWTPGADSYREWIQVDLGLLRFVTAVGTQGAISKETKKKY |
| | | | YVKTYKIDVSSNGEDWITIKEGNKPVLFQGNTNPTDVVVAVFPKPLITRFVRIKPATWETGISMRFEVYGCKITDYPCS |
| | | | GMLGMVSGLISDSQITSSNQGDRNWMPENIRLVTSRSGWALPPAPHSYINEWLQIDLGEEKIVRGIIIQGGKHRENKVF |
| | | | MRKFKIGYSNNGSDWKMIMDDSKRKAKSFEGNNNYDTPELRTFPALSTRFIRIYPERATHGGLGLRMELLGCGGGGSGG |
| | | | GGSCMEALGMESGEIHSDQITASSQYSTNWSAERSRLNYPENGWTPGADSYREWIQVDLGLLRFVTAVGTQGAISKETK |
| | | | KKYYVKTYKIDVSSNGEDWITIKEGNKPVLFQGNTNPTDVVVAVFPKPLITRFVRIKPATWETGISMRFEVYGCKITDY |
| | | | PCSGMLGMVSGLISDSQITSSNQGDRNWMPENIRLVTSRSGWALPPAPHSYINEWLQIDLGEEKIVRGIIIQGGKHREN |
| | | | KVFMRKFKIGYSNNGSDWKMIMDDSKRKAKSFEGNNNYDTPELRTFPALSTRFIRIYPERATHGGLGLRMELLGCGGGG |
| | | | SGGGGSEPKSCDKTHTCPPCPAPELLGGPSVFLFPPKPKDTLMISRTPEVTCVVVDVSHEDPEVKFNWYVDGVEVHNAK |
| | | | TKPREEQYASTYRVVSVLAVLHQDWLNGKEYKCKVSNKALPAPIEKTISKAKGQPREPQVYTLPPSRDELTKNQVSLTC |
| | | | LVKGFYPSDIAVAWESNGQPENNYKTTPPVLDSDGSFFLYSKLTVDKSRWQQGNVFSCSVMHEALHAHYTQKSLSLSPG |
| | | | KGGGGSGGGGSIEEQAKTFLDKFNHEAEDLFYQSSLASWNYNTNITEENVQNMNNAGDKWSAFLKEQSTLAQMYPLQEI |
| | | | WDLGKGDFRGGGGSGGGGSIEEQAKTFLDKFNHEAEDLFYQSSLASWNYNTNITEENVQNMNNAGDKWSAFLKEQSTLA |
| | | | QMYPLQEIWDLGKGDFR |
| 55 | 108 | 1044 | CMEALGMESGEIHSDQITASSQYSTNWSAERSRLNYPENGWTPGADSYREWIQVDLGLLRFVTAVGTQGAISKETKKKY |
| | | | YVKTYKIDVSSNGEDWITIKEGNKPVLFQGNTNPTDVVVAVFPKPLITRFVRIKPATWETGISMRFEVYGCKITDYPCS |
| | | | GMLGMVSGLISDSQITSSNQGDRNWMPENIRLVTSRSGWALPPAPHSYINEWLQIDLGEEKIVRGIIIQGGKHRENKVF |
| | | | MRKFKIGYSNNGSDWKMIMDDSKRKAKSFEGNNNYDTPELRTFPALSTRFIRIYPERATHGGLGLRMELLGCGGGGSGG |
| | | | GGSCMEALGMESGEIHSDQITASSQYSTNWSAERSRLNYPENGWTPGADSYREWIQVDLGLLRFVTAVGTQGAISKETK |
| | | | PCSGMLGMVSGLISDSQITSSNQGDRNWMPENIRLVTSRSGWALPPAPHSYINEWLQIDLGEEKIVRGIIIQGGKHREN |
| | | | KVFMRKFKIGYSNNGSDWKMIMDDSKRKAKSFEGNNNYDTPELRTFPALSTRFIRIYPERATHGGLGLRMELLGCGGGG |
| | | | SGGGGSEPKSCDKTHTCPPCPAPEAAGGPSVFLFPPKPKDTLMISRTPEVTCVVVDVSHEDPEVKFNWYVDGVEVHNAK |
| | | | TKPREEQYNSTYRVVSVLAVLHQDWLNGKEYKCKVSNKALPAPIEKTISKAKGQPREPQVYTLPPSRDELTKNQVSLTC |
| | | | LVKGFYPSDIAVAWESNGQPENNYKTTPPVLDSDGSFFLYSKLTVDKSRWQQGNVFSCSVMHEALHAHYTQKSLSLSPG |
| | | | KGGGGSGGGGSIEEQAKTFLDKFNHEAEDLFYQSSLASWNYNTNITEENVQNMNNAGDKWSAFLKEQSTLAQMYPLQEI |
| | | | WDLGKGDFRGGGGSGGGGSIEEQAKTFLDKFNHEAEDLFYQSSLASWNYNTNITEENVQNMNNAGDKWSAFLKEQSTLA |
| | | | QMYPLQEIWDLGKGDFR |
| 56 | 109 | 1040 | CMEALGMESGEIHSDQITASSQYSTNWSAERSRLNYPENGWTPGEDSYREWIQVDLGLLRFVTAVGTQGAISKETKKKY |
| | | | YVKTYKIDVSSNGEDWITIKEGNKPVLFQGNTNPTDVVVAVFPKPLITRFVRIKPATWETGISMRFEVYGCKITDYPCS |
| | | | GMLGMVSGLISDSQITSSNQGDRNWMPENIRLVTSRSGWALPPAPHSYINEWLQIDLGEEKIVRGIIIQGGKHRENKVF |
| | | | MRKFKIGYSNNGSDWKMIMDDSKRKAKSFEGNNNYDTPELRTFPALSTRFIRIYPERATHGGLGLRMELLGCGGGGSGG |
| | | | GGSCMEALGMESGEIHSDQITASSQYSTNWSAERSRLNYPENGWTPGEDSYREWIQVDLGLLRFVTAVGTQGAISKETK |
| | | | KKYYVKTYKIDVSSNGEDWITIKEGNKPVLFQGNTNPTDVVVAVFPKPLITRFVRIKPATWETGISMRFEVYGCKITDY |
| | | | PCSGMLGMVSGLISDSQITSSNQGDRNWMPENIRLVTSRSGWALPPAPHSYINEWLQIDLGEEKIVRGIIIQGGKHREN |
| | | | KVFMRKFKIGYSNNGSDWKMIMDDSKRKAKSFEGNNNYDTPELRTFPALSTRFIRIYPERATHGGLGLRMELLGCGGGG |
| | | | SGGGGSERKCCVECPPCPAPPVAGPSVFLFPPKPKDQLMISRTPEVTCVVVDVSHEDPEVQFNWYVDGVEVHNAKTKPR |
| | | | EEQFNSTFRVVSVLTVVHQDWLNGKEYKCKVSNKGLPAPIEKTISKTKGQPREPQVYTLPPSREEMTKNQVSLTCLVKG |
| | | | FYPSDIAVEWESNGQPENNYKTTPPMLDSDGSFFLYSKLTVDKSRWQQGNVFSCSVLHEALHNHYTQKSLSLSPGKGGG |
| | | | GSGGGGSIEEQAKTFLDKFNHEAEDLFYQSSLASWNYNTNITEENVQNMNNAGDKWSAFLKEQSTLAQMYPLQEIWDLG |
| | | | KGDFRGGGGSGGGGSIEEQAKTFLDKFNHEAEDLFYQSSLASWNYNTNITEENVQNMNNAGDKWSAFLKEQSTLAQMYP |
| | | | LQEIWDLGKGDFR |
| 57 | 110 | 1040 | CMEALGMESGEIHSDQITASSQYSTNWSAERSRLNYPENGWTPGADSYREWIQVDLGLLRFVTAVGTQGAISKETKKKY |
| | | | YVKTYKIDVSSNGEDWITIKEGNKPVLFQGNTNPTDVVVAVFPKPLITRFVRIKPATWETGISMRFEVYGCKITDYPCS |
| | | | GMLGMVSGLISDSQITSSNQGDRNWMPENIRLVTSRSGWALPPAPHSYINEWLQIDLGEEKIVRGIIIQGGKHRENKVF |
| | | | MRKFKIGYSNNGSDWKMIMDDSKRKAKSFEGNNNYDTPELRTFPALSTRFIRIYPERATHGGLGLRMELLGCGGGGSGG |
| | | | GGSCMEALGMESGEIHSDQITASSQYSTNWSAERSRLNYPENGWTPGADSYREWIQVDLGLLRFVTAVGTQGAISKETK |
| | | | KKYYVKTYKIDVSSNGEDWITIKEGNKPVLFQGNTNPTDVVVAVFPKPLITRFVRIKPATWETGISMRFEVYGCKITDY |
| | | | PCSGMLGMVSGLISDSQITSSNQGDRNWMPENIRLVTSRSGWALPPAPHSYINEWLQIDLGEEKIVRGIIIQGGKHREN |
| | | | KVFMRKFKIGYSNNGSDWKMIMDDSKRKAKSFEGNNNYDTPELRTFPALSTRFIRIYPERATHGGLGLRMELLGCGGGG |
| | | | SGGGGSERKCCVECPPCPAPPVAGPSVFLFPPKPKDQLMISRTPEVTCVVVDVSHEDPEVQFNWYVDGVEVHNAKTKPR |
| | | | EEQFNSTFRVVSVLTVVHQDWLNGKEYKCKVSNKGLPAPIEKTISKTKGQPREPQVYTLPPSREEMTKNQVSLTCLVKG |
| | | | FYPSDIAVEWESNGQPENNYKTTPPMLDSDGSFFLYSKLTVDKSRWQQGNVFSCSVLHEALHNHYTQKSLSLSPGKGGG |
| | | | GSGGGGSIEEQAKTFLDKFNHEAEDLFYQSSLASWNYNTNITEENVQNMNNAGDKWSAFLKEQSTLAQMYPLQEIWDLG |
| | | | KGDFRGGGGSGGGGSIEEQAKTFLDKFNHEAEDLFYQSSLASWNYNTNITEENVQNMNNAGDKWSAFLKEQSTLAQMYP |
| | | | LQEIWDLGKGDFR |
| 58 | 111 | 1044 | CMEALGMESGEIHSDQITASSQASTNWSAERSRLNYPENGWTPGEDSYREWIQVDLGLLRFVTAVGTQGAIAKETKKKA |
| | | | YVKTYKIDVSSNGEDWITIKEGNKPVLFQGNTNPTDVVVAVFPKPLITRFVRIKPATWETGISMRFEVYGCKITDYPCS |
| | | | GMLGMVSGLISDSQITSSNQGDRNWMPENIRLVTSRSGWALPPAPHSYINEWLQIDLGEEKIVRGIIIQGGKHRENKVF |
| | | | MRKFKIGYSNNGSDWKMIMDDSKRKAKSFEGNNNYDTPELRTFPALSTRFIRIYPERATHGGLGLRMELLGCGGGGSGG |
| | | | GGSCMEALGMESGEIHSDQITASSQASTNWSAERSRLNYPENGWTPGEDSYREWIQVDLGLLRFVTAVGTQGAIAKETK |
| | | | KKAYVKTYKIDVSSNGEDWITIKEGNKPVLFQGNTNPTDVVVAVFPKPLITRFVRIKPATWETGISMRFEVYGCKITDY |
| | | | PCSGMLGMVSGLISDSQITSSNQGDRNWMPENIRLVTSRSGWALPPAPHSYINEWLQIDLGEEKIVRGIIIQGGKHREN |
| | | | KVFMRKFKIGYSNNGSDWKMIMDDSKRKAKSFEGNNNYDTPELRTFPALSTRFIRIYPERATHGGLGLRMELLGCGGGG |
| | | | SGGGGSEPKSCDKTHTCPPCPAPELLGGPSVFLFPPKPKDTLMISRTPEVTCVVVDVSHEDPEVKFNWYVDGVEVHNAK |
| | | | TKPREEQYASTYRVVSVLAVLHQDWLNGKEYKCKVSNKALPAPIEKTISKAKGQPREPQVYTLPPSRDELTKNQVSLTC |
| | | | LVKGFYPSDIAVAWESNGQPENNYKTTPPVLDSDGSFFLYSKLTVDKSRWQQGNVFSCSVMHEALHAHYTQKSLSLSPG |
| | | | KGGGGSGGGGSIEEQAKTFLDKFNHEAEDLFYQSSLASWNYNTNITEENVQNMNNAGDKWSAFLKEQSTLAQMYPLQEI |
| | | | WDLGKGDFRGGGGSGGGGSIEEQAKTFLDKFNHEAEDLFYQSSLASWNYNTNITEENVQNMNNAGDKWSAFLKEQSTLA |
| | | | QMYPLQEIWDLGKGDFR |
| 59 | 112 | 1044 | CMEALGMESGEIHSDQITASSQASTNWSAERSRLNYPENGWTPGEDSYREWIQVDLGLLRFVTAVGTQGAIAKETKKKA |
| | | | YVKTYKIDVSSNGEDWITIKEGNKPVLFQGNTNPTDVVVAVFPKPLITRFVRIKPATWETGISMRFEVYGCKITDYPCS |
| | | | GMLGMVSGLISDSQITSSNQGDRNWMPENIRLVTSRSGWALPPAPHSYINEWLQIDLGEEKIVRGIIIQGGKHRENKVF |
| | | | MRKFKIGYSNNGSDWKMIMDDSKRKAKSFEGNNNYDTPELRTFPALSTRFIRIYPERATHGGLGLRMELLGCGGGGSGG |
| | | | GGSCMEALGMESGEIHSDQITASSQASTNWSAERSRLNYPENGWTPGEDSYREWIQVDLGLLRFVTAVGTQGAIAKETK |
| | | | KKAYVKTYKIDVSSNGEDWITIKEGNKPVLFQGNTNPTDVVVAVFPKPLITRFVRIKPATWETGISMRFEVYGCKITDY |
| | | | PCSGMLGMVSGLISDSQITSSNQGDRNWMPENIRLVTSRSGWALPPAPHSYINEWLQIDLGEEKIVRGIIIQGGKHREN |
| | | | KVFMRKFKIGYSNNGSDWKMIMDDSKRKAKSFEGNNNYDTPELRTFPALSTRFIRIYPERATHGGLGLRMELLGCGGGG |
| | | | SGGGGSEPKSCDKTHTCPPCPAPEAAGGPSVFLFPPKPKDTLMISRTPEVTCVVVDVSHEDPEVKFNWYVDGVEVHNAK |
| | | | TKPREEQYNSTYRVVSVLAVLHQDWLNGKEYKCKVSNKALPAPIEKTISKAKGQPREPQVYTLPPSRDELTKNQVSLTC |
| | | | LVKGFYPSDIAVAWESNGQPENNYKTTPPVLDSDGSFFLYSKLTVDKSRWQQGNVFSCSVMHEALHAHYTQKSLSLSPG |
| | | | KGGGGSGGGGSIEEQAKTFLDKFNHEAEDLFYQSSLASWNYNTNITEENVQNMNNAGDKWSAFLKEQSTLAQMYPLQEI |
| | | | WDLGKGDFRGGGGSGGGGSIEEQAKTFLDKFNHEAEDLFYQSSLASWNYNTNITEENVQNMNNAGDKWSAFLKEQSTLA |
| | | | QMYPLQEIWDLGKGDFR |

[0203] Neuropilin-ACE2 Constructs

[0204] In yet another aspect of the current invention, a polypeptide may comprise a b1 domain, or a derivative or fragment thereof, of a neuropilin; and an ACE2 domain, or a derivative or fragment thereof, of angiotensin converting enzyme 2. The b1 domain and ACE2 domain in these embodiments are each capable of binding to a coat protein of a virus selected from the group consisting of herpesviridae, papillomaviridae, coronaviridae, flaviviridae, togaviridae, bornaviridae, bunyaviridae, filoviridae, orthomyxoviridae, paramyxoviridae, pneumoviridae, and retroviridae.

[0205] In some embodiments, the b1 domain, or a derivative or fragment thereof, of a neuropilin may be selected from the group including one or more of SEQ ID NOS: 1-22 coupled to the ACE2 domain, or a derivative or fragment thereof, of angiotensin converting enzyme 2 including one or more of SEQ ID NOS: 32-43. In some embodiments, the b1 domain is attached to the C-terminus of the ACE2 domain. In other embodiments, the b1 domain is attached to the N-terminus of the ACE2 domain. In still other embodiments, a linker selected from the group including one or more of SEQ ID NOS: 44-50 may be coupled between any combinations of the one or more b1 domains fused to the one or more ACE2 domains.

[0206] In some embodiments, the neuropilin-ACE2 polypeptides comprising a b1 domain, or a derivative or fragment thereof, and an ACE2 domain, or a derivative or fragment thereof, may be used in nasal spray compositions.

[0207] Pharmaceutical Compositions

[0208] The polypeptides described herein can be formulated into pharmaceutical compositions that further comprise a pharmaceutically acceptable carrier, diluent, adjuvant or vehicle. In one embodiment, the present invention relates to a pharmaceutical composition comprising a polypeptide of the invention described above, and a pharmaceutically acceptable carrier, diluent, adjuvant or vehicle. In one embodiment, the present invention is a pharmaceutical composition comprising an effective amount of a polypeptide of the present invention or a pharmaceutically acceptable salt thereof and a pharmaceutically acceptable carrier, diluent, adjuvant or vehicle. Pharmaceutically acceptable carriers include, for example, pharmaceutical diluents, excipients or carriers suitably selected with respect to the intended form of administration, and consistent with conventional pharmaceutical practices.

[0209] An “effective amount” includes a “therapeutically effective amount” and a “prophylactically effective amount”. The term “therapeutically effective amount” refers to an amount effective in treating and/or ameliorating a virus infection in a patient infected with a viral infection, e.g., SARS-CoV-2. The term “prophylactically effective amount” refers to an amount effective in preventing and/or substantially lessening the chances or the size of the virus infection outbreak.

[0210] A pharmaceutically acceptable carrier may contain inert ingredients which do not unduly inhibit the biological activity of the polypeptides. The pharmaceutically acceptable carriers should be biocompatible, e.g., non-toxic, non-inflammatory, non-immunogenic or devoid of other undesired reactions or side-effects upon the administration to a subject. Standard pharmaceutical formulation techniques can be employed.

[0211] The pharmaceutically acceptable carrier, adjuvant, or vehicle, as used herein, includes any and all solvents, diluents, or other liquid vehicle, dispersion or suspension aids, surface active agents, isotonic agents, thickening or emulsifying agents, preservatives, solid binders, lubricants and the like, as suited to the particular dosage form desired. Remington's Pharmaceutical Sciences, Sixteenth Edition, E. W. Martin (Mack Publishing Co., Easton, Pa., 1980) discloses various carriers used in formulating pharmaceutically acceptable compositions and known techniques for the preparation thereof. Except insofar as any conventional carrier medium is incompatible with the polypeptides described herein, such as by producing any undesirable biological effect or otherwise interacting in a deleterious manner with any other component(s) of the pharmaceutically acceptable composition, its use is contemplated to be within the scope of this invention. As used herein, the phrase “side effects” encompasses unwanted and adverse effects of a therapy (e.g., a prophylactic or therapeutic agent). Side effects are always unwanted, but unwanted effects are not necessarily adverse. An adverse effect from a therapy (e.g., prophylactic or therapeutic agent) might be harmful or uncomfortable or risky. Side effects include, but are not limited to fever, chills, lethargy, gastrointestinal toxicities (including gastric and intestinal ulcerations and erosions), nausea, vomiting, neurotoxicities, nephrotoxicities, renal toxicities (including such conditions as papillary necrosis and chronic interstitial nephritis), hepatic toxicities (including elevated serum liver enzyme levels), myelotoxicities (including leukopenia, myelosuppression, thrombocytopenia and anemia), dry mouth, metallic taste, prolongation of gestation, weakness, somnolence, pain (including muscle pain, bone pain and headache), hair loss, asthenia, dizziness, extra-pyramidal symptoms, akathisia, cardiovascular disturbances and sexual dysfunction.

[0212] Some examples of materials which can serve as pharmaceutically acceptable carriers include, but are not limited to, ion exchangers, alumina, aluminum stearate, lecithin, serum proteins (such as human serum albumin), buffer substances (such as twin 80, phosphates, glycine, sorbic acid, or potassium sorbate), partial glyceride mixtures of saturated vegetable fatty acids, water, salts or electrolytes (such as protamine sulfate, disodium hydrogen phosphate, potassium hydrogen phosphate, sodium chloride, or zinc salts), colloidal silica, magnesium trisilicate, polyvinyl pyrrolidone, polyacrylates, waxes, polyethylene-polyoxypropylene-block polymers, methylcellulose, hydroxypropyl methylcellulose, wool fat, sugars such as lactose, glucose and sucrose; starches such as corn starch and potato starch; cellulose and its derivatives such as sodium carboxymethyl cellulose, ethyl cellulose and cellulose acetate; powdered tragacanth; malt; gelatin; talc; excipients such as cocoa butter and suppository waxes; oils such as peanut oil, cottonseed oil; safflower oil; sesame oil; olive oil; corn oil and soybean oil; glycols; such a propylene glycol or polyethylene glycol; esters such as ethyl oleate and ethyl laurate; agar; buffering agents such as magnesium hydroxide and aluminum hydroxide; alginic acid; pyrogen-free water; isotonic saline; Ringer's solution; ethyl alcohol, and phosphate buffer solutions, as well as other non-toxic compatible lubricants such as sodium lauryl sulfate and magnesium stearate, as well as coloring agents, releasing agents, coating agents, sweetening, flavoring and perfuming agents, preservatives and antioxidants can also be present in the composition, according to the judgment of the formulator.

[0213] In some embodiments, a composition of the present invention comprises a pharmaceutically acceptable salt.

[0214] The term “pharmaceutically acceptable salts” is meant to include salts of the active compounds that are prepared with relatively nontoxic acids or bases, depending on the particular substituents found on the compounds described herein. When compounds of the present invention contain relatively acidic functionalities, base addition salts can be obtained by contacting the neutral form of such compounds with a sufficient amount of the desired base, either neat or in a suitable inert solvent. Examples of pharmaceutically acceptable base addition salts include sodium, potassium, calcium, ammonium, organic amino, or magnesium salt, or a similar salt. When compounds of the present invention contain relatively basic functionalities, acid addition salts can be obtained by contacting the neutral form of such compounds with a sufficient amount of the desired acid, either neat or in a suitable inert solvent. Examples of pharmaceutically acceptable acid addition salts include those derived from inorganic acids like hydrochloric, hydrobromic, nitric, carbonic, monohydrogencarbonic, phosphoric, monohydrogenphosphoric, dihydrogenphosphoric, sulfuric, monohydrogensulfuric, hydriodic, or phosphorous acids and the like, as well as the salts derived from relatively nontoxic organic acids like acetic, propionic, isobutyric, maleic, malonic, benzoic, succinic, suberic, fumaric, lactic, mandelic, phthalic, benzenesulfonic, p-tolylsulfonic, citric, tartaric, oxalic, methanesulfonic, and the like. Also included are salts of amino acids such as arginate and the like, and salts of organic acids like glucuronic or galactunoric acids and the like (see, for example, Berge et al., “Pharmaceutical Salts”, Journal of Pharmaceutical Science, 1977, 66, 1-19). Certain specific compounds of the present invention contain both basic and acidic functionalities that allow the compounds to be converted into either base or acid addition salts.

[0215] Thus, the compounds of the present invention may exist as salts, such as with pharmaceutically acceptable acids. The present invention includes such salts. Non-limiting examples of such salts include hydrochlorides, hydrobromides, phosphates, sulfates, methanesulfonates, nitrates, maleates, acetates, citrates, fumarates, proprionates, tartrates (e.g., (+)-tartrates, (−)-tartrates, or mixtures thereof including racemic mixtures), succinates, benzoates, and salts with amino acids such as glutamic acid, and quaternary ammonium salts (e.g. methyl iodide, ethyl iodide, and the like). These salts may be prepared by methods known to those skilled in the art.

[0216] The neutral forms of the compounds are preferably regenerated by contacting the salt with a base or acid and isolating the parent compound in the conventional manner. The parent form of the compound may differ from the various salt forms in certain physical properties, such as solubility in polar solvents.

[0217] In addition to salt forms, the present invention provides compounds, which are in a prodrug form. Prodrugs of the compounds described herein are those compounds that readily undergo chemical changes under physiological conditions to provide the compounds of the present invention. Prodrugs of the compounds described herein may be converted in vivo after administration. Additionally, prodrugs can be converted to the compounds of the present invention by chemical or biochemical methods in an ex vivo environment, such as, for example, when contacted with a suitable enzyme or chemical reagent.

[0218] Certain compounds of the present invention can exist in unsolvated forms as well as solvated forms, including hydrated forms. In general, the solvated forms are equivalent to unsolvated forms and are encompassed within the scope of the present invention. Certain compounds of the present invention may exist in multiple crystalline or amorphous forms. In general, all physical forms are equivalent for the uses contemplated by the present invention and are intended to be within the scope of the present invention.

[0219] Administration Methods

[0220] In some embodiments, the compositions of the present invention may be administered to a subject in need thereof. In some embodiments, the compositions of the present invention may be co-administered with one or more additional therapies.

[0221] The terms “administration” or “administering” refer to the act of providing an composition of the present invention, e.g., a polypeptide or pharmaceutically acceptable salt thereof, to a subject in need of treatment thereof.

[0222] In some embodiments, the compositions of the present invention can be administered as follows: oral administration, administration as a suppository, topical contact, intravenous, parenteral, intraperitoneal, intramuscular, intralesional, intrathecal, intranasal or subcutaneous administration, or the implantation of a slow-release device, e.g., a mini-osmotic pump, to a subject. Accordingly, administration can be by any route, including parenteral and transmucosal (e.g., buccal, sublingual, palatal, gingival, nasal, vaginal, rectal, or transdermal). Parenteral administration includes, e.g., intravenous, intramuscular, intra-arteriole, intradermal, subcutaneous, intraperitoneal, intraventricular, and. Other modes of delivery include, but are not limited to, the use of liposomal formulations, intravenous infusion, transdermal patches, etc.

[0223] By “co-administer” it is meant that a composition described herein is administered at the same time, just prior to, or just after the administration of additional therapies. The therapeutic drugs can be administered alone or can be co-administered to the patient. Co-administration is meant to include simultaneous or sequential administration of the components individually or in combination. Thus, the preparations can also be combined, when desired, with other active substances. As used herein, “sequential administration” includes that the administration of two agents (e.g., the agents described herein) do not occur on a same day.

[0224] As used herein, “concurrent administration” includes overlapping in duration at least in part. For example, when two compositions (e.g., any of the compositions described herein) are administered concurrently, their administration occurs within a certain desired time. The administration of the compositions may begin and end on the same day. The administration of one composition can also precede the administration of a second composition by day(s) as long as both compositions are taken on the same day at least once. Similarly, the administration of one composition can extend beyond the administration of a second composition as long as both agents are taken on the same day at least once. The composition do not have to be taken at the same time each day to include concurrent administration.

[0225] As used herein, “intermittent administration includes the administration of an agent for a period of time (which can be considered a “first period of administration”), followed by a time during which the composition is not taken or is taken at a lower maintenance dose (which can be considered “off-period”) followed by a period during which the composition is administered again (which can be considered a “second period of administration”). Generally, during the second phase of administration, the dosage level of the agent will match that administered during the first period of administration but can be increased or decreased as medically necessary.

[0226] The polypeptides and pharmaceutically acceptable compositions described above can be administered to humans and other animals orally, rectally, parenterally, intracisternally, intravaginally, intraperitoneally, topically (as by powders, ointments, or drops), buccally, as an oral or nasal spray, or the like, depending on the severity of the infection being treated.

[0227] In some embodiments of the invention, when treating a subject, an inhibitory agent is administered by systemic intravenous (IV) or by a local intranasal route, such as an intranasal spray, a metered-dose inhaler, a nebulizer, or a dry powder inhaler. Formulations for delivery by a particular method (e.g., solutions, buffers, and preservatives, as well as droplet or particle size for intranasal administration) can be optimized by routine, conventional methods that are well-known in the art. For inhibitory agents that are in the form of aerosol formulations to be administered via inhalation, the aerosol formulations can be placed into pressurized acceptable propellants, such as dichlorodifluoromethane, propane, nitrogen or the like.

[0228] Liquid dosage forms for oral administration include, but are not limited to, pharmaceutically acceptable emulsions, microemulsions, solutions, suspensions, syrups and elixirs. In addition to the active polypeptides, the liquid dosage forms may contain inert diluents commonly used in the art such as, for example, water or other solvents, solubilizing agents and emulsifiers such as ethyl alcohol, isopropyl alcohol, ethyl carbonate, ethyl acetate, benzyl alcohol, benzyl benzoate, propylene glycol, 1,3-butylene glycol, dimethylformamide, oils (in particular, cottonseed, groundnut, corn, germ, olive, castor, and sesame oils), glycerol, tetrahydrofurfuryl alcohol, polyethylene glycols and fatty acid esters of sorbitan, and mixtures thereof. Besides inert diluents, the oral compositions can also include adjuvants such as wetting agents, emulsifying and suspending agents, sweetening, flavoring, and perfuming agents.

[0229] Injectable preparations, for example, sterile injectable aqueous or oleaginous suspensions may be formulated according to the known art using suitable dispersing or wetting agents and suspending agents. The sterile injectable preparation may also be a sterile injectable solution, suspension or emulsion in a nontoxic parenterally acceptable diluent or solvent, for example, as a solution in 1,3-butanediol. Among the acceptable vehicles and solvents that may be employed are water, Ringer's solution, U.S.P. and isotonic sodium chloride solution. In addition, sterile, fixed oils are conventionally employed as a solvent or suspending medium. For this purpose any bland fixed oil can be employed including synthetic mono- or diglycerides. In addition, fatty acids such as oleic acid are used in the preparation of injectables.

[0230] The injectable formulations can be sterilized, for example, by filtration through a bacterial-retaining filter, or by incorporating sterilizing agents in the form of sterile solid compositions which can be dissolved or dispersed in sterile water or other sterile injectable medium prior to use.

[0231] In order to prolong the effect of a polypeptide described herein, it is often desirable to slow the absorption of the polypeptide from subcutaneous or intramuscular injection. This may be accomplished by the use of a liquid suspension of crystalline or amorphous material with poor water solubility. The rate of absorption of the polypeptide then depends upon its rate of dissolution that, in turn, may depend upon crystal size and crystalline form. Alternatively, delayed absorption of a parenterally administered polypeptide form is accomplished by dissolving or suspending the polypeptide in an oil vehicle. Injectable depot forms are made by forming microencapsule matrices of the polypeptide in biodegradable polymers such as polylactide-polyglycolide. Depending upon the ratio of polypeptide to polymer and the nature of the particular polymer employed, the rate of polypeptide release can be controlled. Examples of other biodegradable polymers include poly(orthoesters) and poly(anhydrides). Depot injectable formulations are also prepared by entrapping the polypeptide in liposomes or microemulsions that are compatible with body tissues.

[0232] Compositions for rectal or vaginal administration are specifically suppositories which can be prepared by mixing the polypeptides described herein with suitable non-irritating excipients or carriers such as cocoa butter, polyethylene glycol or a suppository wax which are solid at ambient temperature but liquid at body temperature and therefore melt in the rectum or vaginal cavity and release the active polypeptide.

[0233] Solid dosage forms for oral administration include capsules, tablets, pills, powders, and granules. In such solid dosage forms, the polypeptide (i.e., active polypeptide) is mixed with at least one inert, pharmaceutically acceptable excipient or carrier such as sodium citrate or dicalcium phosphate and/or a) fillers or extenders such as starches, lactose, sucrose, glucose, mannitol, and silicic acid, b) binders such as, for example, carboxymethylcellulose, alginates, gelatin, polyvinylpyrrolidinone, sucrose, and acacia, c) humectants such as glycerol, d) disintegrating agents such as agar-agar, calcium carbonate, potato or tapioca starch, alginic acid, certain silicates, and sodium carbonate, e) solution retarding agents such as paraffin, f) absorption accelerators such as quaternary ammonium compounds, g) wetting agents such as, for example, cetyl alcohol and glycerol monostearate, h) absorbents such as kaolin and bentonite clay, and i) lubricants such as talc, calcium stearate, magnesium stearate, solid polyethylene glycols, sodium lauryl sulfate, and mixtures thereof. In the case of capsules, tablets and pills, the dosage form may also comprise buffering agents.

[0234] Solid compositions of a similar type may also be employed as fillers in soft and hard-filled gelatin capsules using such excipients as lactose or milk sugar as well as high molecular weight polyethylene glycols and the like. The solid dosage forms of tablets, dragees, capsules, pills, and granules can be prepared with coatings and shells such as enteric coatings and other coatings well known in the pharmaceutical formulating art. They may optionally contain opacifying agents and can also be of a composition that they release the active ingredient(s) only, or preferentially, in a certain part of the intestinal tract, optionally, in a delayed manner. Examples of embedding compositions that can be used include polymeric substances and waxes. Solid compositions of a similar type may also be employed as fillers in soft and hard-filled gelatin capsules using such excipients as lactose or milk sugar as well as high molecular weight polyethylene glycols and the like.

[0235] The active polypeptides can also be in microencapsulated form with one or more excipients as noted above. The solid dosage forms of tablets, dragees, capsules, pills, and granules can be prepared with coatings and shells such as enteric coatings, release controlling coatings and other coatings well known in the pharmaceutical formulating art. In such solid dosage forms the active polypeptide may be admixed with at least one inert diluent such as sucrose, lactose or starch. Such dosage forms may also comprise, as is normal practice, additional substances other than inert diluents, e.g., tableting lubricants and other tableting aids such a magnesium stearate and microcrystalline cellulose. In the case of capsules, tablets and pills, the dosage forms may also comprise buffering agents. They may optionally contain opacifying agents and can also be of a composition that they release the active ingredient(s) only, or preferentially, in a certain part of the intestinal tract, optionally, in a delayed manner. Examples of embedding compositions that can be used include polymeric substances and waxes.

[0236] Dosage forms for topical or transdermal administration of a polypeptide described herein include ointments, pastes, creams, lotions, gels, powders, solutions, sprays, inhalants or patches. The active component is admixed under sterile conditions with a pharmaceutically acceptable carrier and any needed preservatives or buffers as may be required. Ophthalmic formulation, eardrops, and eye drops are also contemplated as being within the scope of this invention. Additionally, the present invention contemplates the use of transdermal patches, which have the added advantage of providing controlled delivery of a polypeptide to the body. Such dosage forms can be made by dissolving or dispensing the polypeptide in the proper medium. Absorption enhancers can also be used to increase the flux of the polypeptide across the skin. The rate can be controlled by either providing a rate controlling membrane or by dispersing the polypeptide in a polymer matrix or gel.

[0237] The compositions described herein may be administered orally, parenterally, by inhalation spray, topically, rectally, nasally, buccally, vaginally or via an implanted reservoir. The term “parenteral” as used herein includes, but is not limited to, subcutaneous, intravenous, intramuscular, intra-articular, intra-synovial, intrasternal, intrathecal, intrahepatic, intralesional and intracranial injection or infusion techniques. Specifically, the compositions are administered orally, intraperitoneally or intravenously.

[0238] Sterile injectable forms of the compositions described herein may be aqueous or oleaginous suspension. These suspensions may be formulated according to techniques known in the art using suitable dispersing or wetting agents and suspending agents. The sterile injectable preparation may also be a sterile injectable solution or suspension in a non-toxic parenterally-acceptable diluent or solvent, for example as a solution in 1,3-butanediol. Among the acceptable vehicles and solvents that may be employed are water, Ringer's solution and isotonic sodium chloride solution. In addition, sterile, fixed oils are conventionally employed as a solvent or suspending medium. For this purpose, any bland fixed oil may be employed including synthetic mono- or di-glycerides. Fatty acids, such as oleic acid and its glyceride derivatives are useful in the preparation of injectables, as are natural pharmaceutically-acceptable oils, such as olive oil or castor oil, especially in their polyoxyethylated versions. These oil solutions or suspensions may also contain a long-chain alcohol diluent or dispersant, such as carboxymethyl cellulose or similar dispersing agents which are commonly used in the formulation of pharmaceutically acceptable dosage forms including emulsions and suspensions. Other commonly used surfactants, such as Tweens, Spans and other emulsifying agents or bioavailability enhancers which are commonly used in the manufacture of pharmaceutically acceptable solid, liquid, or other dosage forms may also be used for the purposes of formulation.

[0239] The pharmaceutical compositions described herein may be orally administered in any orally acceptable dosage form including, but not limited to, capsules, tablets, aqueous suspensions or solutions. In the case of tablets for oral use, carriers commonly used include, but are not limited to, lactose and corn starch. Lubricating agents, such as magnesium stearate, are also typically added. For oral administration in a capsule form, useful diluents include lactose and dried cornstarch. When aqueous suspensions are required for oral use, the active ingredient is combined with emulsifying and suspending agents. If desired, certain sweetening, flavoring or coloring agents may also be added.

[0240] Alternatively, the pharmaceutical compositions described herein may be administered in the form of suppositories for rectal administration. These can be prepared by mixing the agent with a suitable non-irritating excipient which is solid at room temperature but liquid at rectal temperature and therefore will melt in the rectum to release the drug. Such materials include, but are not limited to, cocoa butter, beeswax and polyethylene glycols.

[0241] The pharmaceutical compositions described herein may also be administered topically, especially when the target of treatment includes areas or organs readily accessible by topical application, including diseases of the eye, the skin, or the lower intestinal tract. Suitable topical formulations are readily prepared for each of these areas or organs.

[0242] Topical application for the lower intestinal tract can be effected in a rectal suppository formulation (see above) or in a suitable enema formulation. Topically-transdermal patches may also be used.

[0243] For topical applications, the pharmaceutical compositions may be formulated in a suitable ointment containing the active component suspended or dissolved in one or more carriers. Carriers for topical administration of the polypeptides of this invention include, but are not limited to, mineral oil, liquid petrolatum, white petrolatum, propylene glycol, polyoxyethylene, polyoxypropylene compound, emulsifying wax and water. Alternatively, the pharmaceutical compositions can be formulated in a suitable lotion or cream containing the active components suspended or dissolved in one or more pharmaceutically acceptable carriers. Suitable carriers include, but are not limited to, mineral oil, sorbitan monostearate, polysorbate 60, cetyl esters wax, cetearyl alcohol, 2 octyldodecanol, benzyl alcohol and water.

[0244] For ophthalmic use, the pharmaceutical compositions may be formulated as micronized suspensions in isotonic, pH adjusted sterile saline, or, specifically, as solutions in isotonic, pH adjusted sterile saline, either with or without a preservative such as benzylalkonium chloride. Alternatively, for ophthalmic uses, the pharmaceutical compositions may be formulated in an ointment such as petrolatum.

[0245] The pharmaceutical compositions may also be administered by nasal aerosol or inhalation. Such compositions are prepared according to techniques well-known in the art of pharmaceutical formulation and may be prepared as solutions in saline, employing benzyl alcohol or other suitable preservatives, absorption promoters to enhance bioavailability, fluorocarbons, and/or other conventional solubilizing or dispersing agents.

[0246] The polypeptides for use in the methods of the invention can be formulated in unit dosage form. The term “unit dosage form” refers to physically discrete units suitable as unitary dosage for subjects undergoing treatment, with each unit containing a predetermined quantity of active material calculated to produce the desired therapeutic effect, optionally in association with a suitable pharmaceutical carrier. The unit dosage form can be for a single daily dose or one of multiple daily doses (e.g., about 1 to 4 or more times per day). When multiple daily doses are used, the unit dosage form can be the same or different for each dose.

[0247] Pulmonary/Nasal Administration

[0248] For pulmonary administration, preferably, at least one polypeptide composition is delivered in a particle size effective for reaching the lower airways of the lung or sinuses. According to the invention, at least one polypeptide as disclosed herein can be delivered by any of a variety of inhalation or nasal devices known in the art for administration of a therapeutic agent by inhalation. These devices are capable of depositing aerosolized formulations in the sinus cavity or alveoli of a patient include metered dose inhalers, nebulizers, dry powder generators, sprayers, and the like. Other devices suitable for directing the pulmonary or nasal administration of polypeptides are also known in the art. Many of such devices can use formulations suitable for the administration for the dispensing of polypeptides in an aerosol. Such aerosols can be comprised of either solutions (both aqueous and non-aqueous) or solid particles.

[0249] Metered dose inhalers like the Ventolin® metered dose inhaler, typically use a propellant gas and require actuation during inspiration (See, e.g., WO 94/16970, WO 98/35888). Dry powder inhalers like TURBUHALER™ (Astra), ROTAHALER® (Glaxo), DISKUS® (Glaxo), SPIROS™ inhaler (Dura), devices marketed by Inhale Therapeutics, and the SPINHALER® powder inhaler (Fisons), use breath-actuation of a mixed powder (U.S. Pat. No. 4,668,218 Astra, EP 237507 Astra, WO 97/25086 Glaxo, WO 94/08552 Dura, U.S. Pat. No. 5,458,135 Inhale, WO 94/06498 Fisons, entirely incorporated herein by reference). Nebulizers like AERX™ Aradigm, the ULTRAVENT® nebulizer (Mallinckrodt), and the ACORN II® nebulizer (Marquest Medical Products) (U.S. Pat. No. 5,404,871 Aradigm, WO 97/22376), the above references are entirely incorporated herein by reference, produce aerosols from solutions, while metered dose inhalers, dry powder inhalers, etc. generate small particle aerosols. These specific examples of commercially available inhalation devices are intended to be a representative of specific devices suitable for the practice of this invention, and are not intended as limiting the scope of the invention.

[0250] In some embodiments, a composition comprising at least one polypeptide as disclosed herein is delivered by a dry powder inhaler or a sprayer. There are several desirable features of an inhalation device for administering at least one polypeptide of the present invention. For example, delivery by the inhalation device is advantageously reliable, reproducible, and accurate. The inhalation device can optionally deliver small dry particles, e.g., less than about 10 μm, preferably about 1-5 μm, for good respirability.

[0251] A spray including the polypeptide composition can be produced by forcing a suspension or solution of at least one polypeptide through a nozzle under pressure. The nozzle size and configuration, the applied pressure, and the liquid feed rate can be chosen to achieve the desired output and particle size. An electrospray can be produced, for example, by an electric field in connection with a capillary or nozzle feed. Advantageously, particles of at least one polypeptide delivered by a sprayer have a particle size less than about 10 μm, in some embodiments, in the range of about 1 μm to about 5 μm, of from about 2 μm to about 3 μm.

[0252] Formulations having at least one polypeptide suitable for use with a sprayer typically include a polypeptide composition in an aqueous solution at a concentration of about 0.1 mg to about 100 mg of at least one polypeptide per ml of solution or mg/gm, or any range, value, or fraction therein. The formulation can include agents, such as an excipient, a buffer, an isotonicity agent, a preservative, a surfactant, and, preferably, zinc. The formulation can also include an excipient or agent for stabilization of the polypeptide composition, such as a buffer, a reducing agent, a bulk protein, or a carbohydrate. Bulk proteins useful in formulating polypeptide compositions include albumin, protamine, or the like. Typical carbohydrates useful in formulating polypeptide compositions include sucrose, mannitol, lactose, trehalose, glucose, or the like. The polypeptide composition formulation can also include a surfactant, which can reduce or prevent surface-induced aggregation of the polypeptide composition caused by atomization of the solution in forming an aerosol. Various conventional surfactants can be employed, such as polyoxyethylene fatty acid esters and alcohols, and polyoxyethylene sorbitol fatty acid esters. Amounts will generally range between 0.001 and 14% by weight of the formulation. Especially preferred surfactants for purposes of this invention are polyoxyethylene sorbitan monooleate, polysorbate 80, polysorbate 20, or the like. Additional agents known in the art for formulation of polypeptides, such as IL-23p19 antibodies, or specified portions or variants, can also be included in the formulation.

[0253] Administration of the Polypeptide Compositions by a Nebulizer

[0254] Polypeptide compositions of the invention can be administered by a nebulizer, such as jet nebulizer or an ultrasonic nebulizer. Typically, in a jet nebulizer, a compressed air source is used to create a high-velocity air jet through an orifice. As the gas expands beyond the nozzle, a low-pressure region is created, which draws a solution of polypeptide composition through a capillary tube connected to a liquid reservoir. The liquid stream from the capillary tube is sheared into unstable filaments and droplets as it exits the tube, creating the aerosol. A range of configurations, flow rates, and baffle types can be employed to achieve the desired performance characteristics from a given jet nebulizer. In an ultrasonic nebulizer, high-frequency electrical energy is used to create vibrational, mechanical energy, typically employing a piezoelectric transducer. This energy is transmitted to the formulation of the polypeptide composition either directly or through a coupling fluid, creating an aerosol including the polypeptide composition. Advantageously, particles of the polypeptide composition delivered by a nebulizer have a particle size less than about 10 μm, in some embodiments, in the range of about 1 μm to about 5 μm, or from about 2 μm to about 3 μm.

[0255] Formulations of at least one polypeptide suitable for use with a nebulizer, either jet or ultrasonic, typically include a concentration of about 0.1 mg to about 100 mg of at least one polypeptide per ml of solution. The formulation can include agents, such as an excipient, a buffer, an isotonicity agent, a preservative, a surfactant, and, preferably, zinc. The formulation can also include an excipient or agent for stabilization of the at least one polypeptide composition, such as a buffer, a reducing agent, a bulk protein, or a carbohydrate. Bulk proteins useful in formulating at least one polypeptide compositions include albumin, protamine, or the like. Typical carbohydrates useful in formulating at least one polypeptide include sucrose, mannitol, lactose, trehalose, glucose, or the like. The at least one polypeptide formulation can also include a surfactant, which can reduce or prevent surface-induced aggregation of the at least one polypeptide caused by atomization of the solution in forming an aerosol. Various conventional surfactants can be employed, such as polyoxyethylene fatty acid esters and alcohols, and polyoxyethylene sorbital fatty acid esters. Amounts will generally range between about 0.001 and 4% by weight of the formulation. Especially preferred surfactants for purposes of this invention are polyoxyethylene sorbitan mono-oleate, polysorbate 80, polysorbate 20, or the like. Additional agents known in the art for formulation of a polypeptide, such as antibody protein, can also be included in the formulation.

[0256] Administration of the Polypeptide Compositions by a Metered Dose Inhaler

[0257] In a metered dose inhaler (MDI), a propellant, at least one polypeptide as disclosed herein, and any excipients or other additives are contained in a canister as a mixture including a liquefied compressed gas. Actuation of the metering valve releases the mixture as an aerosol, preferably containing particles in the size range of less than about 10 μm, in some embodiments, about 1 μm to about 5 μm, or from about 2 μm to about 3 μm. The desired aerosol particle size can be obtained by employing a formulation of polypeptide composition produced by various methods known to those of skill in the art, including jet-milling, spray drying, critical point condensation, or the like. Preferred metered dose inhalers include those manufactured by 3M or Glaxo and employing a hydrofluorocarbon propellant. Formulations of at least one polypeptide for use with a metered-dose inhaler device will generally include a finely divided powder containing at least one polypeptide as a suspension in a non-aqueous medium, for example, suspended in a propellant with the aid of a surfactant. The propellant can be any conventional material employed for this purpose, such as chlorofluorocarbon, a hydrochlorofluorocarbon, a hydrofluorocarbon, or a hydrocarbon, including trichlorofluoromethane, dichlorodifluoromethane, dichlorotetrafluoroethanol and 1,1,1,2-tetrafluoroethane, HFA-134a (hydrofluroalkane-134a), HFA-227 (hydrofluroalkane-227), or the like. Preferably, the propellant is a hydrofluorocarbon. The surfactant can be chosen to stabilize the at least one polypeptide as a suspension in the propellant, to protect the active agent against chemical degradation, and the like. Suitable surfactants include sorbitan trioleate, soya lecithin, oleic acid, or the like. In some cases, solution aerosols are preferred using solvents, such as ethanol. Additional agents known in the art for formulation of a polypeptide can also be included in the formulation. One of ordinary skill in the art will recognize that the methods of the current invention can be achieved by pulmonary administration of at least one polypeptide composition via devices not described herein.

[0258] Combination Therapy

[0259] An effective amount can be achieved in the method or pharmaceutical composition of the invention employing the polypeptide or a pharmaceutically acceptable salt or solvate (e.g., hydrate) thereof alone or in combination with an additional suitable therapeutic agent, for example, an antiviral agent or a vaccine. When “combination therapy” is employed, an effective amount can be achieved using a first amount of the polypeptide, or a pharmaceutically acceptable salt or solvate (e.g., hydrate) thereof, and a second amount of an additional suitable therapeutic agent (e.g. an antiviral agent or vaccine).

[0260] In other embodiments of this invention, the polypeptide and the additional therapeutic agent, are each administered in an effective amount (i.e., each in an amount which would be therapeutically effective if administered alone). In another embodiment, the polypeptide and the additional therapeutic agent are each administered in an amount which alone does not provide a therapeutic effect (a sub-therapeutic dose). In yet another embodiment, the polypeptide can be administered in an effective amount, while the additional therapeutic agent is administered in a sub-therapeutic dose. In still another embodiment, the polypeptide can be administered in a sub-therapeutic dose, while the additional therapeutic agent, for example, a suitable anti-viral therapeutic agent is administered in an effective amount.

[0261] As used herein, the terms “in combination” or “co-administration” can be used interchangeably to refer to the use of more than one therapy (e.g., one or more prophylactic and/or therapeutic agents). The use of the terms does not restrict the order in which therapies (e.g., prophylactic and/or therapeutic agents) are administered to a subject.

[0262] Co-administration encompasses administration of the first and second amounts of the polypeptides of the co-administration in an essentially simultaneous manner, such as in a single pharmaceutical composition, for example, capsule or tablet having a fixed ratio of first and second amounts, or in multiple, separate capsules or tablets for each. In addition, such co-administration also encompasses use of each polypeptide in a sequential manner in either order.

[0263] In some embodiments, the present invention is directed to methods of combination therapy for treating a viral infection (e.g., COVID-19) by inhibiting the virus's replication in biological samples or patients, or for treating or preventing virus infections in patients using the polypeptides or pharmaceutical compositions of the invention. Accordingly, pharmaceutical compositions of the invention also include those comprising an inhibitor of virus replication of this invention in combination with an anti-viral polypeptide exhibiting anti-viral activity.

[0264] When co-administration involves the separate administration of the first amount of the polypeptide and a second amount of an additional therapeutic agent, the polypeptides are administered sufficiently close in time to have the desired therapeutic effect. For example, the period of time between each administration which can result in the desired therapeutic effect, can range from minutes to hours and can be determined taking into account the properties of each polypeptide such as potency, solubility, bioavailability, plasma half-life and kinetic profile. For example, the polypeptide and the second therapeutic agent can be administered in any order within about 24 hours of each other, within about 16 hours of each other, within about 8 hours of each other, within about 4 hours of each other, within about 1 hour of each other or within about 30 minutes of each other.

[0265] More, specifically, a first therapy (e.g., a prophylactic or therapeutic agent such as any one of the polypeptides of the invention) can be administered prior to (e.g., 5 minutes, 15 minutes, 30 minutes, 45 minutes, 1 hour, 2 hours, 4 hours, 6 hours, 12 hours, 24 hours, 48 hours, 72 hours, 96 hours, 1 week, 2 weeks, 3 weeks, 4 weeks, 5 weeks, 6 weeks, 8 weeks, or 12 weeks before), concomitantly with, or subsequent to (e.g., 5 minutes, 15 minutes, 30 minutes, 45 minutes, 1 hour, 2 hours, 4 hours, 6 hours, 12 hours, 24 hours, 48 hours, 72 hours, 96 hours, 1 week, 2 weeks, 3 weeks, 4 weeks, 5 weeks, 6 weeks, 8 weeks, or 12 weeks after) the administration of a second therapy (e.g., a prophylactic or therapeutic agent such as an anti-viral agent) to a subject.

[0266] It is understood that the method of co-administration of a first amount of the polypeptide and a second amount of an additional therapeutic agent can result in an enhanced or synergistic therapeutic effect, wherein the combined effect is greater than the additive effect that would result from separate administration of the first amount of the polypeptide and the second amount of the additional therapeutic agent.

[0267] As used herein, the term “synergistic” refers to a combination of a polypeptide of the invention and another therapy (e.g., a prophylactic or therapeutic agent), which is more effective than the additive effects of the therapies. A synergistic effect of a combination of therapies (e.g., a combination of prophylactic or therapeutic agents) can permit the use of lower dosages of one or more of the therapies and/or less frequent administration of said therapies to a subject. The ability to utilize lower dosages of a therapy (e.g., a prophylactic or therapeutic agent) and/or to administer said therapy less frequently can reduce the toxicity associated with the administration of said therapy to a subject without reducing the efficacy of said therapy in the prevention, management or treatment of a disorder. In addition, a synergistic effect can result in improved efficacy of agents in the prevention, management or treatment of a disorder. Finally, a synergistic effect of a combination of therapies (e.g., a combination of prophylactic or therapeutic agents) may avoid or reduce adverse or unwanted side effects associated with the use of either therapy alone.

[0268] When the combination therapy using polypeptides of the present invention is in combination with a vaccine, both therapeutic agents can be administered so that the period of time between each administration can be longer (e.g. days, weeks or months).

[0269] The presence of a synergistic effect can be determined using suitable methods for assessing drug interaction. Suitable methods include, for example, the Sigmoid-Emax equation (Holford, N. H. G. and Schemer, L. B., Clin. Pharmacokinet. 6: 429-453 (1981)), the equation of Loewe additivity (Loewe, S. and Muischnek, H., Arch. Exp. Pathol Pharmacol. 114: 313-326 (1926)) and the median-effect equation (Chou, T. C. and Talalay, P., Adv. Enzyme Regul. 22: 27-55 (1984)). Each equation referred to above can be applied with experimental data to generate a corresponding graph to aid in assessing the effects of the drug combination. The corresponding graphs associated with the equations referred to above are the concentration-effect curve, isobologram curve and combination index curve, respectively.

[0270] Specific examples that can be co-administered with a polypeptide described herein include Remdesivir, neuraminidase inhibitors, such as oseltamivir (Tamiflu®) and Zanamivir (RLENZA®), viral ion channel (M2 protein) blockers, such as amantadine (SYMMETREL®) and rimantadine (FLUMADINE®), and antiviral drugs described in WO 2003/015798, including T-705 under development by Toyama Chemical of Japan. (See also Ruruta et al., Antiviral Research, 82: 95-102 (2009), “T-705 (flavipiravir) and related compounds: Novel broad-spectrum inhibitors of RNA viral infections.”) In some embodiments, the polypeptides described herein can be co-administered with a traditional influenza vaccine.

### Exemplary Embodiments

[0271] In some embodiments, the present invention comprises, consists essentially of, or consists of, a recombinant polypeptide comprising: (a) one or more mutant neuropilin (NRP) domains, or fragments thereof, and (b) an immunoglobulin domain; wherein the one or more mutant NRP domains result in reduced binding of the recombinant polypeptide to heparin or heparan sulfate relative to a wild-type NRP domain.

[0272] In some embodiments, the recombinant polypeptide comprises one or more mutant NRP domains are derived from an NRP1 or an NRP2 protein.

[0273] In some embodiments, the one or more mutant NRP domains are one or more mutant b1 domains, or one or more mutant b2 domains.

[0274] In some embodiments, the one or more mutant NRP domains has one or more amino substitutions selected from groups consisting of: K373E, K351A, E319A, K358E, R513E, K514E, K516E, R513A, K514A, K516A, Y297A, S345A, and Y353A, relative to the wild-type amino acid sequence set forth in SEQ ID NO: 1.

[0275] In some embodiments, the one or more mutant NRP domains result in reduced binding of the recombinant polypeptide to heparin.

[0276] In some embodiments, the one or more mutant NRP domains result in reduced binding of the recombinant polypeptide to heparan sulfate.

[0277] In some embodiments, the immunoglobin domain is an Fc domain.

[0278] In some embodiments, the present invention comprises, consists essentially of, or consists of, a recombinant polypeptide comprising: (a) one or more mutant neuropilin (NRP) b1 domains, NRP b2 domains, or fragments thereof, and (b) an Fc domain; wherein the one or more mutant NRP b1 domains, NRP b2 domains, or fragments thereof are derived from an NRP1 or an NRP2 protein; wherein the one or more mutant NRP b1 domains, NRP b2 domains, or fragments thereof have one or more amino substitutions selected from groups consisting of: K373E, K351A, E319A, K358E, R513E, K514E, K516E, R513A, K514A, K516A, Y297A, S345A, and Y353A, relative to the wild-type amino acid sequence set forth in SEQ ID NO: 1; and wherein the one or more one or more amino substitutions result in reduced binding of the recombinant polypeptide to heparin or heparan sulfate.

[0279] In some embodiments, the present invention comprises, consists essentially of, or consists of, a recombinant polypeptide comprising: (a) one or more mutant neuropilin (NRP) b1 domains (b1), NRP b2 domains (b2), or fragments thereof; and (b) an Fc domain; wherein (a) and (b) comprise a construct having an orientation of: b1-Fc; b1b1-Fc; b1b1b1-Fc; b1-Fc; b1b1b1-Fc; b1b2-Fc; b1b2-Fc; b1b2-Fc; b1b2-Fc; Fc-b1b2; Fc-b1b2; b1-Fc-b1; b1b1-Fc-b1; b1-Fc; b1b1-Fc; b1b1b1-Fc; b1-Fc; b1b1b1-Fc; b1-Fc; b1b1b1-Fc; b1b2-Fc; b1b2-Fc; Fc-b1b2; Fc-b1b2; b1-Fc-b1; b1b1-Fc-b1; wherein the one or more b1, b2, or fragments thereof, are derived from an NRP1 or an NRP2 protein; wherein the one or more b1, b2, or fragments thereof have one or more amino substitutions selected from groups consisting of: K373E, K351A, E319A, K358E, R513E, K514E, K516E, R513A, K514A, K516A, Y297A, S345A, and Y353A, relative to the wild-type amino acid sequence set forth in SEQ ID NO: 1; and wherein the one or more one or more amino substitutions result in reduced binding of the recombinant polypeptide to heparin or heparan sulfate.

[0280] In some embodiments, the present invention comprises, consists essentially of, or consists of, a recombinant polypeptide comprising: (a) one or more mutant neuropilin (NRP) domains, or fragments thereof, and (b) an immunoglobulin domain; wherein the recombinant polypeptide is operable to bind to virus having an —Z₁-X₁-X₂—Z₂- (CendR) motif, wherein Z₁ and Z₂ are arginine or lysine, and X₁ and X₂ are any amino acid.

[0281] In some embodiments, the recombinant polypeptide has one or more mutant NRP domains, or fragments thereof, that are derived from an NRP1 or an NRP2 protein.

[0282] In some embodiments, the one or more mutant NRP domains, or fragments thereof, are one or more mutant b1 domains, or one or more mutant b2 domains.

[0283] In some embodiments, the present invention comprises, consists essentially of, or consists of, a recombinant polypeptide comprising: (a) one or more mutant neuropilin (NRP) domains, or fragments thereof, and (b) an immunoglobulin domain; wherein the recombinant polypeptide is operable to bind to virus having an —Z₁-X₁-X₂—Z₂- (CendR) motif, wherein Z₁ and Z₂ are arginine or lysine, and X₁ and X₂ are any amino acid, wherein the virus is a virus belonging to the Realm: Duplodnaviria; Monodnaviria; Riboviria; or Varidnaviria.

[0284] In some embodiments, the virus is a virus belonging to the Kingdom: Bamfordvirae; Heunggongvirae; Orthornavirae; Pararnavirae; or Shotokuvirae.

[0285] In some embodiments, the virus is a virus belonging to the Phylum: Artverviricota; Cossaviricota; Kitrinoviricota; Negarnaviricota; Nucleocytoviricota; Peploviricota; or Pisuviricota.

[0286] In some embodiments, the virus is a virus belonging to the Class: Alsuviricetes; Ellioviricetes; Flasuviricetes; Herviviricetes; Insthoviricetes; Monjiviricetes; Papovaviricetes; Pisoniviricetes; Pokkesviricetes; Revtraviricetes; or Stelpaviricetes.

[0287] In some embodiments, the virus is a virus belonging to the Order: Amarillovirales; Articulavirales; Bunyavirales; Chitovirales; Hepelivirales; Herpesvirales; Jingchuvirales; Martellivirales; Mononegavirales; Nidovirales; Ortervirales; Stellavirales; or Zurhausenvirales.

[0288] In some embodiments, the virus is a virus belonging to the Family: Astroviridae; Bunyaviridae; Bornaviridae; Chuviridae; Coronaviridae; Flaviviridae; Filoviridae; Hantaviridae; Hepeviridae; Herpesviridae; Nairoviridae; Orthomyxoviridae; Papillomaviridae; Paramyxoviridae; Peribunyaviridae; Phenuiviridae; Pneumoviridae; Poxviridae; Retroviridae; Rhabdoviridae; or Togaviridae.

[0289] In some embodiments, the virus is selected from the group consisting of: Dengue; respiratory syncytial virus (RSV); Hantavirus; Epstein-Barr virus (EBV); EBV (uncleaved); SARS-CoV-2 Wuhan; SARS-CoV-2 Wuhan (uncleaved); SARS-CoV-2 UK; SARS-CoV-2 India; SARS-CoV-2 India (uncleaved); HCoV-OC43; MERS-CoV; MERS-CoV (uncleaved); Herpes simplex virus (HSV) 1; HSV 1 (uncleaved); influenza A H5N1 virus (IAV H5N1); human papillomavirus (HPV); Human Metapneumovirus; and human immunodeficiency virus (HIV).

[0290] In some embodiments, the virus has a CendR motif selected from the group consisting of:

GTCTQSGERRREKR;
KNTNVTLSKKRKRR;
LTHKMIEESHRLRR;
VSFKPPPPPSRRRR;
VSFKPPPPPSRRRRGACVVY;
CASYQTQTNSPRRAR;
CASYQTQTNSPRRARSVASQSIIAYTMSLG;
ASYQTQTNSHRRAR;
ASYQTQTNSRRRAR;
ASYQTQTNSRRRARSVASQSIIAY;
GSGYCVDYSKNRRSR;
LLEPVSISTGSRSAR;
LLEPVSISTGSRSARSAIEDLLFDK;
ERPRAPARSASRPRR;
ERPRAPARSASRPRRPV;
VLATGLRNVPQRKKR;
PTTSSTSTTAKRKKR;
IDMLKARVKNRVAR;
AKRRVVQREKR;
and
AKRRVVQREKRAVGIGALFLG.

[0291] In some embodiments, the present invention comprises, consists essentially of, or consists of, a recombinant polypeptide comprising: (a) one or more mutant neuropilin (NRP) b1 domains (b1), NRP b2 domains (b2), or fragments thereof; and (b) an Fc domain; wherein the one or more b1, b2, or fragments thereof, are derived from an NRP1 or an NRP2 protein; wherein the recombinant polypeptide is operable to bind to virus having an —Z₁-X₁-X₂—Z₂- (CendR) motif, wherein Z₁ and Z₂ are arginine or lysine, and X₁ and X₂ are any amino acid; and wherein the virus is selected from the group consisting of: Dengue; respiratory syncytial virus (RSV); Hantavirus; Epstein-Barr virus (EBV); EBV (uncleaved); SARS-CoV-2 Wuhan; SARS-CoV-2 Wuhan (uncleaved); SARS-CoV-2 UK; SARS-CoV-2 India; SARS-CoV-2 India (uncleaved); HCoV-OC43; MERS-CoV; MERS-CoV (uncleaved); Herpes simplex virus (HSV) 1; HSV 1 (uncleaved); influenza A H5N1 virus (IAV H5N1); human papillomavirus (HPV); Human Metapneumovirus; and human immunodeficiency virus (HIV).

[0292] In some embodiments, the present invention comprises, consists essentially of, or consists of, a recombinant polypeptide comprising: (a) one or more mutant neuropilin (NRP) b1 domains (b1), NRP b2 domains (b2), or fragments thereof; and (b) an Fc domain; wherein the one or more b1, b2, or fragments thereof, are derived from an NRP1 or an NRP2 protein; wherein the recombinant polypeptide is operable to bind to virus having an —Z₁-X₁-X₂—Z₂- (CendR) motif, wherein Z₁ and Z₂ are arginine or lysine, and X₁ and X₂ are any amino acid; and wherein the virus has a CendR motif selected from the group consisting of:

GTCTQSGERRREKR;
KNTNVTLSKKRKRR;
LTHKMIEESHRLRR;
VSFKPPPPPSRRRR;
VSFKPPPPPSRRRRGACVVY;
CASYQTQTNSPRRAR;
CASYQTQTNSPRRARSVASQSIIAYTMSLG;
ASYQTQTNSHRRAR;
ASYQTQTNSRRRAR;
ASYQTQTNSRRRARSVASQSIIAY;
GSGYCVDYSKNRRSR;
LLEPVSISTGSRSAR;
LLEPVSISTGSRSARSAIEDLLFDK;
ERPRAPARSASRPRR;
ERPRAPARSASRPRRPV;
VLATGLRNVPQRKKR;
PTTSSTSTTAKRKKR;
IDMLKARVKNRVAR;
AKRRVVQREKR;
and
AKRRVVQREKRAVGIGALFLG.

[0293] In some embodiments, the present invention comprises, consists essentially of, or consists of, a recombinant polypeptide comprising an amino acid sequence that is at least 50% identical, at least 55% identical, at least 60% identical, at least 65% identical, at least 70% identical, at least 75% identical, at least 80% identical, at least 81% identical, at least 82% identical, at least 83% identical, at least 84% identical, at least 85% identical, at least 86% identical, at least 87% identical, at least 88% identical, at least 89% identical, at least 90% identical, at least 91% identical, at least 92% identical, at least 93% identical, at least 94% identical, at least 95% identical, at least 96% identical, at least 97% identical, at least 98% identical, at least 99% identical, at least 99.5% identical, at least 99.6% identical, at least 99.7% identical, at least 99.8% identical, at least 99.9% identical, or 100% identical to an amino acid sequence set forth in any one of the SEQ ID NOs. listed in Table 21, or a pharmaceutically acceptable salt thereof.

[0294] In some embodiments, the present invention comprises, consists essentially of, or consists of, a recombinant polypeptide comprising an amino acid sequence that is at least 50% identical, at least 55% identical, at least 60% identical, at least 65% identical, at least 70% identical, at least 75% identical, at least 80% identical, at least 81% identical, at least 82% identical, at least 83% identical, at least 84% identical, at least 85% identical, at least 86% identical, at least 87% identical, at least 88% identical, at least 89% identical, at least 90% identical, at least 91% identical, at least 92% identical, at least 93% identical, at least 94% identical, at least 95% identical, at least 96% identical, at least 97% identical, at least 98% identical, at least 99% identical, at least 99.5% identical, at least 99.6% identical, at least 99.7% identical, at least 99.8% identical, at least 99.9% identical, or 100% identical to an amino acid sequence set forth in any one of the SEQ ID NOs. listed in Table 21, or a pharmaceutically acceptable salt thereof, and further comprising an excipient.

[0295] In some embodiments, the present invention comprises, consists essentially of, or consists of, a recombinant polypeptide comprising an amino acid sequence that is at least 50% identical, at least 55% identical, at least 60% identical, at least 65% identical, at least 70% identical, at least 75% identical, at least 80% identical, at least 81% identical, at least 82% identical, at least 83% identical, at least 84% identical, at least 85% identical, at least 86% identical, at least 87% identical, at least 88% identical, at least 89% identical, at least 90% identical, at least 91% identical, at least 92% identical, at least 93% identical, at least 94% identical, at least 95% identical, at least 96% identical, at least 97% identical, at least 98% identical, at least 99% identical, at least 99.5% identical, at least 99.6% identical, at least 99.7% identical, at least 99.8% identical, at least 99.9% identical, or 100% identical to an amino acid sequence set forth in any one of SEQ ID NOs: 113-116, 121-122, 133-137, 148-149, 154, 162, and 193-201, or a pharmaceutically acceptable salt thereof.

[0296] In some embodiments, the present invention comprises, consists essentially of, or consists of, a recombinant polypeptide comprising an amino acid sequence that is at least 50% identical, at least 55% identical, at least 60% identical, at least 65% identical, at least 70% identical, at least 75% identical, at least 80% identical, at least 81% identical, at least 82% identical, at least 83% identical, at least 84% identical, at least 85% identical, at least 86% identical, at least 87% identical, at least 88% identical, at least 89% identical, at least 90% identical, at least 91% identical, at least 92% identical, at least 93% identical, at least 94% identical, at least 95% identical, at least 96% identical, at least 97% identical, at least 98% identical, at least 99% identical, at least 99.5% identical, at least 99.6% identical, at least 99.7% identical, at least 99.8% identical, at least 99.9% identical, or 100% identical to an amino acid sequence set forth in any one of SEQ ID NOs: 113-116, 121-122, 133-137, 148-149, 154, 162, and 193-201, or a pharmaceutically acceptable salt thereof, and further comprising an excipient.

[0297] In some embodiments, the present invention comprises, consists essentially of, or consists of, a recombinant polypeptide comprising an amino acid sequence that is at least 90% identical to an amino acid sequence set forth in any one of SEQ ID NOs: 113-116, 121-122, 133-137, 148-149, 154, 162, and 193-201, or a pharmaceutically acceptable salt thereof.

[0298] In some embodiments, the present invention comprises, consists essentially of, or consists of, a recombinant polypeptide consisting of an amino acid sequence that is at least 90% identical to an amino acid sequence according to set forth in any one of SEQ ID NOs: 113-116, 121-122, 133-137, 148-149, 154, 162, and 193-201, or a pharmaceutically acceptable salt thereof.

[0299] In some embodiments, the present invention comprises, consists essentially of, or consists of, a recombinant polypeptide consisting of an amino acid sequence set forth in any one of SEQ ID NOs: 113-116, 121-122, 133-137, 148-149, 154, 162, and 193-201, or a pharmaceutically acceptable salt thereof.

[0300] In some embodiments, the present invention comprises, consists essentially of, or consists of, a method of limiting the occurrence of, reducing the risk of, reducing the severity of, or treating a viral infection, in a subject in need thereof, said method comprising administering to the subject a composition comprising a therapeutically effective amount of a recombinant polypeptide comprising: (a) one or more mutant neuropilin (NRP) domains, or fragments thereof, and (b) an immunoglobulin domain; wherein the recombinant polypeptide is operable to bind to virus having an —Z₁-X₁-X₂—Z₂- (CendR) motif, wherein Z₁ and Z₂ are arginine or lysine, and X₁ and X₂ are any amino acid.

[0301] In some embodiments of the method, the one or more mutant NRP domains, or fragments thereof, are derived from an NRP1 or an NRP2 protein.

[0302] In some embodiments of the method, the one or more mutant NRP domains, or fragments thereof, are one or more mutant b1 domains, or one or more mutant b2 domains.

[0303] In some embodiments of the method, the virus is a virus belonging to the Realm: Duplodnaviria; Monodnaviria; Riboviria; or Varidnaviria.

[0304] In some embodiments of the method, the virus is a virus belonging to the Kingdom: Bamfordvirae; Heunggongvirae; Orthornavirae; Pararnavirae; or Shotokuvirae.

[0305] In some embodiments of the method, the virus is a virus belonging to the Phylum: Artverviricota; Cossaviricota; Kitrinoviricota; Negarnaviricota; Nucleocytoviricota; Peploviricota; or Pisuviricota.

[0306] In some embodiments of the method, the virus is a virus belonging to the Class: Alsuviricetes; Ellioviricetes; Flasuviricetes; Herviviricetes; Insthoviricetes; Monjiviricetes; Papovaviricetes; Pisoniviricetes; Pokkesviricetes; Revtraviricetes; or Stelpaviricetes.

[0307] In some embodiments of the method, the virus is a virus belonging to the Order: Amarillovirales; Articulavirales; Bunyavirales; Chitovirales; Hepelivirales; Herpesvirales; Jingchuvirales; Martellivirales; Mononegavirales; Nidovirales; Ortervirales; Stellavirales; or Zurhausenvirales.

[0308] In some embodiments of the method, the virus is a virus belonging to the Family: Astroviridae; Bunyaviridae; Bornaviridae; Chuviridae; Coronaviridae; Flaviviridae; Filoviridae; Hantaviridae; Hepeviridae; Herpesviridae; Nairoviridae; Orthomyxoviridae; Papillomaviridae; Paramyxoviridae; Peribunyaviridae; Phenuiviridae; Pneumoviridae; Poxviridae; Retroviridae; Rhabdoviridae; or Togaviridae.

[0309] In some embodiments of the method, the virus is selected from the group consisting of: Dengue; respiratory syncytial virus (RSV); Hantavirus; Epstein-Barr virus (EBV); EBV (uncleaved); SARS-CoV-2 Wuhan; SARS-CoV-2 Wuhan (uncleaved); SARS-CoV-2 UK; SARS-CoV-2 India; SARS-CoV-2 India (uncleaved); HCoV-OC43; MERS-CoV; MERS-CoV (uncleaved); Herpes simplex virus (HSV) 1; HSV 1 (uncleaved); influenza A H5N1 virus (IAV H5N1); human papillomavirus (HPV); Human Metapneumovirus; and human immunodeficiency virus (HIV).

[0310] In some embodiments of the method, the virus has a CendR motif selected from the group consisting of:

GTCTQSGERRREKR;
KNTNVTLSKKRKRR;
LTHKMIEESHRLRR;
VSFKPPPPPSRRRR;
VSFKPPPPPSRRRRGACVVY;
CASYQTQTNSPRRAR;
CASYQTQTNSPRRARSVASQSIIAYTMSLG;
ASYQTQTNSHRRAR;
ASYQTQTNSRRRAR;
ASYQTQTNSRRRARSVASQSIIAY;
GSGYCVDYSKNRRSR;
LLEPVSISTGSRSAR;
LLEPVSISTGSRSARSAIEDLLFDK;
ERPRAPARSASRPRR;
ERPRAPARSASRPRRPV;
VLATGLRNVPQRKKR;
PTTSSTSTTAKRKKR;
IDMLKARVKNRVAR;
AKRRVVQREKR;
and
AKRRVVQREKRAVGIGALFLG.

[0311] In some embodiments, the present invention comprises, consists essentially of, or consists of, a method of limiting the occurrence of, reducing the risk of, reducing the severity of, or treating a viral infection, in a subject in need thereof, said method comprising administering to the subject a composition comprising a therapeutically effective amount of a recombinant polypeptide comprising: (a) one or more mutant neuropilin (NRP) b1 domains (b1), NRP b2 domains (b2), or fragments thereof, and (b) an Fc domain; wherein the one or more b1, b2, or fragments thereof, are derived from an NRP1 or an NRP2 protein; wherein the recombinant polypeptide is operable to bind to virus having an —Z₁-X₁-X₂—Z₂- (CendR) motif, wherein Z₁ and Z₂ are arginine or lysine, and X₁ and X₂ are any amino acid; and wherein the virus is selected from the group consisting of: Dengue; respiratory syncytial virus (RSV); Hantavirus; Epstein-Barr virus (EBV); EBV (uncleaved); SARS-CoV-2 Wuhan; SARS-CoV-2 Wuhan (uncleaved); SARS-CoV-2 UK; SARS-CoV-2 India; SARS-CoV-2 India (uncleaved); HCoV-OC43; MERS-CoV; MERS-CoV (uncleaved); Herpes simplex virus (HSV) 1; HSV 1 (uncleaved); influenza A H5N1 virus (IAV H5N1); human papillomavirus (HPV); Human Metapneumovirus; and human immunodeficiency virus (HIV).

[0312] In some embodiments, the present invention comprises, consists essentially of, or consists of, a method of limiting the occurrence of, reducing the risk of, reducing the severity of, or treating a viral infection, in a subject in need thereof, said method comprising administering to the subject a composition comprising a therapeutically effective amount of a recombinant polypeptide comprising: (a) one or more mutant neuropilin (NRP) b1 domains (b1), NRP b2 domains (b2), or fragments thereof, and (b) an Fc domain; wherein the one or more b1, b2, or fragments thereof, are derived from an NRP1 or an NRP2 protein; wherein the recombinant polypeptide is operable to bind to virus having an —Z₁-X₁-X₂—Z₂- (CendR) motif, wherein Z₁ and Z₂ are arginine or lysine, and X₁ and X₂ are any amino acid; and wherein the virus has a CendR motif selected from the group comprising any motif disclosed in Tables 36 or 37.

[0313] In some embodiments, the present invention comprises, consists essentially of, or consists of, a method of limiting the occurrence of, reducing the risk of, reducing the severity of, or treating a viral infection, in a subject in need thereof, said method comprising administering to the subject a composition comprising a therapeutically effective amount of a recombinant polypeptide comprising: (a) one or more mutant neuropilin (NRP) b1 domains (b1), NRP b2 domains (b2), or fragments thereof, and (b) an Fc domain; wherein the one or more b1, b2, or fragments thereof, are derived from an NRP1 or an NRP2 protein; wherein the recombinant polypeptide is operable to bind to virus having an —Z₁-X₁-X₂—Z₂- (CendR) motif, wherein Z₁ and Z₂ are arginine or lysine, and X₁ and X₂ are any amino acid; and wherein the virus has a CendR motif selected from the group consisting of:

GTCTQSGERRREKR;
KNTNVTLSKKRKRR;
LTHKMIEESHRLRR;
VSFKPPPPPSRRRR;
VSFKPPPPPSRRRRGACVVY;
CASYQTQTNSPRRAR;
CASYQTQTNSPRRARSVASQSIIAYTMSLG;
ASYQTQTNSHRRAR;
ASYQTQTNSRRRAR;
ASYQTQTNSRRRARSVASQSIIAY;
GSGYCVDYSKNRRSR;
LLEPVSISTGSRSAR;
LLEPVSISTGSRSARSAIEDLLFDK;
ERPRAPARSASRPRR;
ERPRAPARSASRPRRPV;
VLATGLRNVPQRKKR;
PTTSSTSTTAKRKKR;
IDMLKARVKNRVAR;
AKRRVVQREKR;
and
AKRRVVQREKRAVGIGALFLG.

[0314] In some embodiments, the present invention comprises, consists essentially of, or consists of, a method of limiting the occurrence of, reducing the risk of, reducing the severity of, or treating a viral infection, in a subject in need thereof, said method comprising administering to the subject a composition comprising a therapeutically effective amount of a recombinant polypeptide comprising an amino acid sequence that is at least 90% identical to an amino acid sequence set forth in any one of SEQ ID NOs: 113-116, 121-122, 133-137, 148-149, 154, 162, and 193-201, or a pharmaceutically acceptable salt thereof.

[0315] In some embodiments, the present invention comprises, consists essentially of, or consists of, a method of limiting the occurrence of, reducing the risk of, reducing the severity of, or treating a viral infection, in a subject in need thereof, said method comprising administering to the subject a composition comprising a therapeutically effective amount of a recombinant polypeptide consisting of an amino acid sequence that is at least 90% identical to an amino acid sequence according to set forth in any one of SEQ ID NOs: 113-116, 121-122, 133-137, 148-149, 154, 162, and 193-201, or a pharmaceutically acceptable salt thereof.

[0316] In some embodiments, the present invention comprises, consists essentially of, or consists of, a method of limiting the occurrence of, reducing the risk of, reducing the severity of, or treating a viral infection, in a subject in need thereof, said method comprising administering to the subject a composition comprising a therapeutically effective amount of a recombinant polypeptide consisting of an amino acid sequence set forth in any one of SEQ ID NOs: 113-116, 121-122, 133-137, 148-149, 154, 162, and 193-201, or a pharmaceutically acceptable salt thereof.

### Examples

[0317] The Examples in this specification are not intended to, and should not be used to, limit the invention; they are provided only to illustrate the invention.

### Example 1. Design and Production of Constructs

[0318] Several types of expression vectors have been designed herein. The first type of expression vector comprises a b1 domain of a neuropilin and an immunoglobulin domain (e.g., Fc domain) as described in Tables 7A and 7B. A second type of expression vector comprises an ACE2 domain of an angiotensin-converting enzyme 2 and an immunoglobulin domain (e.g., Fc domain) as described in Table 6. A third type of expression vector comprises a b1 domain of a neuropilin, an ACE2 domain of an angiotensin-converting enzyme 2, and an immunoglobulin domain (e.g., Fc domain) as described in Tables 8A and 8B.

[0319] To increase the binding affinity to spike proteins of a particular virus, such as SARS-CoV-2, polypeptides, also referred to herein as fusion proteins, may be designed to include one or more b1 or neuropilin domains and/or one or more ACE2 or angiotensin-converting enzyme 2 domains.

[0320] To increase the binding affinity to spike proteins of a particular virus, such as SARS-CoV-2, polypeptides, also referred to herein as fusion proteins, may be designed with mutations in the b1 or neuropilin domain and/or mutations in the ACE2 or angiotensin-converting enzyme 2 domain. In some embodiments, a mutation in the b1 or neuropilin domain may include an E319A mutation. In some embodiments, a mutation of the ACE2 or angiotensin-converting enzyme 2 domain may include a F28W, D30A, L79T mutation.

[0321] To decrease the binding affinity to spike proteins of virus, fusion proteins may be designed with mutations in the b1 or neuropilin domain and/or mutations in the angiotensin-converting enzyme 2 domain. In some embodiments, a mutation of the neuropilin fragment may include Y297A/S346A/Y353A, T349A, and K351A mutations of the b1 domain.

[0322] To increase the binding affinity to FcRn, fusion proteins may be designed with mutations in the immunoglobulin Fc domain. In some embodiments, a mutation of the immunoglobulin domain may include N434A and T307A/E380A/N434A (AAA) mutations of the Fc domain.

[0323] To decrease the Fc-mediated effector function, the polypeptides or fusion proteins may be designed with mutations in the immunoglobulin Fc domain. In some embodiments, this mutation in the immunoglobulin domain may include L235E, F234A/L235A, N297A, N297Q, or N297G mutations of the Fc domain. In other embodiments, the immunoglobulin Fc domain of IgG2 and IgG4 may be utilized to decrease the Fc-mediated effector function of fusion proteins.

[0324] To decrease the antibody-dependent enhancement (ADE), some decoys were designed with mutations in the immunoglobulin Fc domain. In some embodiments, the mutation in the immunoglobulin domain may include L235E, F234A/L235A, N297A, N297Q, or N297G mutations in the Fc domain. In other embodiments, the immunoglobulin Fc domain of IgG2 and IgG4 may be utilized to decrease the Fc-mediated effector function of fusion proteins.

[0325] Human neuropilin-1 (UniProt ID: 014786, SEQ ID NO: 1) and human neuropilin-2 (UniProt ID: 060462, SEQ ID NO:2) were used as the source of neuropilin fragment. Human angiotensin-converting enzyme 2 (UniProt ID: Q9BYF1, SEQ ID NO: 32) was used as the source of angiotensin-converting enzyme 2 fragment. Human IgG variants were used as the source of immunoglobulin Fc region. The derivatives of these sequences, including amino acid substitutions, are provided in Tables 1-3.

[0326] Generally, protein constructs are synthesized as follows: expression constructs are generated by codon-optimized gene synthesis and inserted into pcDNA3.4 as expression vector using the Not I and Hind III restriction enzyme. The constructed expression vectors include signal peptides and for optimized transcription a Kozak sequence are sometimes included in the 5′ untranslated regions. The resulting plasmids containing the gene encoding the protein constructs are transformed into One Shot™ Top10 E. coli competent cells, and transformed cells are cultured overnight. The constructed plasmids are obtained by the PureLink™ HiPure Expi plasmid Megaprep kit (ThermoFisher Scientific, Waltham, Mass.).

[0327] Fusion proteins are transiently expressed in the CHO-S system (ThermoFisher Scientific). The proteins are expressed individually according to the manufacturer's recommended conditions. Briefly, a total of 0.8 pg of plasmid DNA at a ratio of 1:1 light to heavy chain per mL of CHO-S culture is prepared with OPTIPRO™ SFM and EXPIFECTAMINE™. The mixture was added to CHO-S cells at a viable cell density of 6×106 cells/mL and greater than 98% viability. The cell culture is incubated overnight at 37° C., 80% humidity, 8% CO₂ in a Nalgene™ Single-Use PETG Erlenmeyer Flasks shaking at 125 RPM with a 19-mm orbit. The next day the culture is enhanced (EXPICHO™ enhancer; ThermoFisher Scientific.) and fed (EXPICHO™ feed; ThermoFisher Scientific) and transferred to 32° C., 80% humidity, 5% CO₂ shaking at 125 RPM with a 19-mm orbit. The second feed is performed on day 5 and the culture returned to 32° C. until harvest on day 12. Harvesting is accomplished via centrifugation at 4000×g for 20 minutes. The clarified supernatant is sterilized using an asymmetrical polyethersulfone (PES) 0.22-μM filter assembly (Nalgene). The filtrate is stored at 4° C. until purification.

[0328] All of the antibody sterilized supernatants is purified using MabSelect PRISMA™ resin (GE Healthcare Life Sciences) on an ÅKTApure (GE Healthcare Life Sciences). A 50 mM sodium phosphate, 150 mM NaCl, pH 7.0 buffer is used to equilibrate the resin. The antibody supernatant is then loaded into the column. The resin is washed with 50 mM sodium phosphate, 150 mM NaCl, pH 7.0 buffer until the chromatographic baseline returned to column equilibration levels. Elution is then performed using 100 mM sodium acetate, 20% glycerol, pH 3.0, and fractions are collected. The fractions are immediately neutralized with 1 M Tris, pH 9. The fractions containing predominant absorbance at wavelength 280 nm are pooled into an Amicon 10-kDa ultrafiltration device for buffer exchange. The storage buffer (Phosphate Buffered Saline) is used to remove the elution buffer by centrifugation with half dilution, seven times in the Amicon concentrator. The material is submitted for SEC and then stored at 4° C.

[0329] Size exclusion chromatography (SEC) analysis is performed on an Agilent Infinity 1260 II Quatenary Pump high performance liquid chromatographic (HPLC) system with diode array UV detector WR. Twenty (10) pg of antibody material was injected on a TSKgel G3000SWXL, 5 μm, 7.8 mm ID×30 cm column. The mobile phase is Phosphate Buffered Saline, and the flowrate was 1 mL/min. The antibody material is detected at wavelength 220, 280 and 330 nm at 1 Hz sampling rate during a 15 minute acquisition.

### Example 2. In Vitro Testing

[0330] The in vitro testing used Fluorescence-based Enzyme-Linked Immuno-Sorbent Assays (ELISAs) to identify the binding properties of Human Neuropilin- and Angiotensin-Converting Enzyme 2 (ACE2)-Based Human IgG Fc constructs to the SARS-CoV-2 Spike Protein. The ELISA methods used herein were used to rank the order the binding affinities of disclosed Neuropilin-1/2 (NP1 or NP2) and ACE2 human IgG Fc fusion constructs. Also described are the binding of two peptides identified from the SAR-CoV-2 S1/S2 interface of the spike protein that provides entry of the virus into cells via the N1 and N2 receptors along with a peptide derived from the ACE2 amino-terminal alpha 1 domain that was demonstrated to bind the SAR-CoV-2 Spike protein.

[0331] The reagents and materials used in the fluorescence binding assays are provided below in Table 9. The instrumentation used is provided in Table 10.

TABLE 9
Reagents Used for Fluorescence Binding Assays.

| | | Catalog | Lot |
|---|---|---|---|
| Reagent | Manufacturer | Number | Number |
| N1ab-huIgG Fc (D12A N1E) | Pinetree | | |
| FITC-SEQ9 (CendR Peptide) | WatsonBio | 112551-8 | WB212207- |
| | | | P200623 |
| FITC-SEQ7 (ACE2 α1 | WatsonBio | 112551-4 | WB212203- |
| Peptide) | | | P200623 |
| SARS-CoV-2 (2019-nCoV) | Sino | 40589- | |
| Spike S1 + S2 ECD-His | Biological | V08B1 | |
| hub1b2-His | Samsung | | |
| FITC-Anti-Human IgG | Abcam | | |
| Dulbecco's Phosphate | Corning | 21-031- | 006620012 |
| Buffered Saline (PBS) | | CM | |
| Bovine Serum Albumin | | | |
| (BSA) | | | |
| Nickel Coated Plates, Black, | Pierce | 15342 | |
| 96-Well | | | |

TABLE 10
Instrumentation Used in the Fluorescence Binding Assays.

| | | Catalog | Lot |
|---|---|---|---|
| Equipment | Manufacturer | Number | Number |
| Varioskan Lux Multimode | ThermoFisher | VLB000GD0 | NA |
| Fluorescence Microplate | | | |
| reader | | | |
| 37° Incubator | VWR | | |

### Example 3. Sample Preparation

[0332] All protein constructs and peptides were diluted with PBS to the concentrations listed in Table 11. BSA was diluted to 5% in 1×PBS.

TABLE 11
Construct and Peptide Concentration.

| | | Molecular | | Final |
|---|---|---|---|---|
| | | Weight | | Concentration |
| Construct/Peptide | Diluent | (g/mol) | Final Volume | (μg/mL) |
| N1ab-huIgG Fc (D12A N1E) | 1 × PBS | 190,000 | | 2.00 |
| FITC-SEQ9 (CendR Peptide) | | 2,241 | | 0.03 |
| FITC-SEQ7 (ACE2 α1 | | 4,065 | | 0.03 |
| Peptide) | | | | |
| I. SARS-CoV-2 Spike | | 401,241 | 4 mL for plate 1 | 3.30 |
| S1 + S2 ECD-His | | | 6 mL for plate 2 | |
| b1b2-His | | 35,754 | | 0.30 |
| FITC-Anti-Human IgG | | 150,000 | | 3.10 |

### Example 4. Plate Preparation and Sample Addition

[0333] In Experiment 1, plate 1 (see Table 12) was coated with 200 μL of SARS-CoV-2 Spike S1+S2 ECD-His protein in wells A1 through B10 (dark shading) for a final coating amount of 0.66 μg per well and wells C1 through D10 were coated with hub1b2-His for a final coating of 0.06 μg per well. The plate was incubated overnight in a 5° C. refrigerator. The next day, all assays preparations were conducted at room temperature, except for incubations that were at 37° C. Plate 1 was removed from the refrigerator and the liquid removed by flicking the plate over a sink. All wells were rinsed 3-times with 250 μL 1×PBS. After the final rinse, the plate was vigorously tapped top side down onto a paper towel to remove any remaining excess liquid. All the wells were then blocked with 200 μL of 5% BSA and the plate was incubated at 37° C. for 1 hour. Following the incubation, the liquid was removed, and the wells washed as described above.

[0334] The FITC-labelled ACE2 al peptide was further diluted to 1.15 μg/mL in 800 μL PBS while the FITC-labelled CendR peptide was diluted to 1.54 μg/mL also in 800 μL PBS. 190 μL of 1×PBS was added to wells A2-A10, B2-B10, C2-C10, and D2-D10. 380 μl of the ACE2 al peptide dilution was added to wells A1 and B1, while the same amount of the CendR peptide was added to wells C1 and D1. Afterwards, a multichannel pipettor was used to remove 190 μL from each of the first wells (A1, B1, C1, and D1) and transferred to the next column of wells. The samples were carefully mixed as not to contaminate the neighboring wells. This procedure was completed for all the proceeding wells until wells A10, B10, C10, and D10 were completed. This process resulted in a 2-fold dilution for each well from column 1 to column 10 in rows A, B, C, and D (see Table 12) The excess 190 μL remaining from the final dilution in column 10 was discarded.

TABLE 12
Plate 1 Plate Map.

| | | Amount of Peptide Per Well (ng) | | | | | | | | | | | |
|---|---|---|---|---|---|---|---|---|---|---|---|---|---|
| | | 1 | 2 | 3 | 4 | 5 | 6 | 7 | 8 | 9 | 10 | 11 | 12 |
| ACE2 | A | 218.88 | 109.44 | 54.72 | 27.36 | 13.68 | 6.84 | 3.42 | 1.71 | 0.855 | 0.428 | Blank | Blank |
| Dilution | B | 218.88 | 109.44 | 54.72 | 27.36 | 13.68 | 6.84 | 3.42 | 1.71 | 0.855 | 0.428 | Blank | Blank |
| S1/S2 | C | 291.84 | 145.92 | 72.96 | 36.48 | 18.24 | 9.12 | 4.56 | 2.28 | 1.14 | 0.57 | Blank | Blank |
| Dilution | D | 291.84 | 145.92 | 72.96 | 36.48 | 18.24 | 9.12 | 4.56 | 2.28 | 1.14 | 0.57 | Blank | Blank |

Note:
Only Rows A-D are presented. The others were not used in this study.

[0335] The plate was placed in a 37° C. incubator for 1 hour. Following the incubation, the liquid was removed, and the plate washed and dried as described above.

[0336] The Relative Fluorescence Units (RFU) from each well was immediately measured using a Varioskan Lux Multimode Fluorescence Microplate reader using the manufacturer suggested conditions with a 495 nm excitation and 519 nm emission, and a graph of the results is presented in FIG. 6.

[0337] As provided in FIG. 6, Graph A shows a 1:1 binding relationship for the ACE2 peptide binding to the SAR-CoV-2 virus spike protein over the doses used in this study with an R² value of 0.9865 for the curve fit. Still referring to FIG. 6, Graph B shows a 1:1 binding relationship for the CendR peptide binding to the SARS-CoV-2 virus spike protein over the doses used in the study with an R² value of 0.9870 for the curve fit.

[0338] In Experiment 2, plate 2 (see Table 13) was coated with 200 μL of SARS-CoV-2 Spike S1+S2 ECD-His protein in wells A1 through F10 for a final coating amount of 0.66 μg per well The plate was incubated overnight in a 5° C. refrigerator. The next day, all assays preparations were conducted at room temperature, except for incubations that were at 37° C. Plate 2 was removed from the refrigerator and the liquid removed by flicking the plate over a sink. All wells were rinsed 3-times with 250 μL 1×PBS. After the final rinse, the plate was vigorously tapped top side down onto a paper towel to remove any remaining excess liquid. All the wells were then blocked with 200 μL of 5% BSA and the plate was incubated at 37° C. for 1 hour. Following the incubation, the liquid was removed, and the wells washed as described above.

[0339] The NRP1ab-huIgG Fc (D12A NIE) protein was further diluted to 64 μg/mL in 1200 μL PBS. 190 μL of 1×PBS was added to wells A2-A10, B2-B10, and C2-C10. 380 μL of the NRP1ab-huIgG Fc (D12A N1E) protein dilution was added to wells A1, B1, and C1. Afterwards, a multichannel pipettor was used to remove 190 μL from each of the first wells (A1, B1, and C1) and transferred to the next column of wells. The samples were carefully mixed as not to contaminate the neighboring wells. This procedure was completed for all the proceeding wells until wells A10, B10, and C10 were completed. This process resulted in a 2-fold dilution for each well from column 1 to column 10 in rows A, B, and C. The excess 190 μL remaining from the final dilution in column 10 was discarded.

TABLE 13
Plate 2 Plate Map

| | | Amount of Peptide Per Well (ng) | | | | | | | | | | | |
|---|---|---|---|---|---|---|---|---|---|---|---|---|---|
| | | 1 | 2 | 3 | 4 | 5 | 6 | 7 | 8 | 9 | 10 | 11 | 12 |
| ACE2 | A | 331.6 | 165.8 | 82.9 | 41.5 | 20.7 | 10.4 | 5.2 | 2.6 | 1.3 | 0.7 | Blank | Blank |
| Dilution | B | 331.6 | 165.8 | 82.9 | 41.5 | 20.7 | 10.4 | 5.2 | 2.6 | 1.3 | 0.7 | Blank | Blank |
| S1/S2 | C | 331.6 | 165.8 | 82.9 | 41.5 | 20.7 | 10.4 | 5.2 | 2.6 | 1.3 | 0.7 | Blank | Blank |
| Dilution | | | | | | | | | | | | | |

Note:
Only rows A-C3 are presented. The others were not used in this study.

[0340] The plate was placed in a 37° C. incubator for 1 hour. Following the incubation, the liquid was removed, and the plate washed and dried as described above.

[0341] FITC-labelled, anti-human IgG was diluted to 3.1 μg/mL in PBS and 200 μL of this dilution was added to all the wells on the plate except for rows D-H and columns 11 and 12. The plate was placed in a 37° C. incubator for 1 hour. Following the incubation, the liquid was removed, and the plate washed and dried as described above.

[0342] The relative fluorescence units (RFU) from each well was measured using a Varioskan Lux Multimode Fluorescence Microplate reader using the manufacturer suggested conditions with a 495 nm excitation and 519 nm emission, and a graph of the results is presented in FIG. 7.

[0343] Referring to FIG. 7, the graph shows a 1:1 binding of the huN1ab-huIgG Fc construct to the SARS-CoV-2 virus spike protein over the doses use in this study with an R² value of 0.9966 for the curve fit. It is important to note that the 41.5 and 0.7 ng points were omitted from the graph because they were considered outliers that significantly deviated from the other data points on the curve.

[0344] The methods described above are also used to determine the affinity of the various polypeptide constructs described herein for SARS-CoV-2 Spike S1+S2 ECD-His.

### Example 5. Cell-Based Assays

[0345] Cell Line Development—Vector Cloning and Engineering of Transgene Expressing Cell Lines

[0346] In order to test various therapeutics that may interfere with SARS-CoV-2 infection in a cell-based assay system, HEK-293T and Vero E6 cells are engineered with lentivirus (LV) to stably overexpress ACE2, NRP1, TMPRSS2 or any combination of the three. Table 14 lists the plasmids that were developed in house for lentiviral transduction of cells.

TABLE 14
Plasmid list for cell line development.

| Reagent (plasmid) | Manufacturer |
|---|---|
| LV-ACE2-Zeo | Pinetree |
| LV-NRP1-Puro | Pinetree |
| LV-TMPRSS2-Blast | Pinetree |

[0347] Plasmid Development

[0348] The full-length ACE2 gene was amplified by PCR using hACE2 plasmid (Addgene #1786) as a DNA template and cloned into a Pinetree lentiviral plasmid, LV-IRES-Zeo using NheI and XhoI. The full length NRP1 gene was amplified by PCR using pcDNA3.4-NRP1, which was synthesized by Genewiz Inc. (Cambridge, MA) and cloned into a Pinetree lentiviral plasmid, LV-2A-Puro using NheI and XhoI. The full length TMPRSS2 gene was amplified by PCR using TMPRSS2 plasmid (Addgene #53887) as a DNA template and cloned into a Pinetree lentiviral plasmid, LV-2A-Blast. DNA sequences of ACE2, NRP1, and TMPRSS2 in lentiviral plasmids was confirmed by Sanger sequencing at Genewiz Inc. (Cambridge, MA).

[0349] Lentiviral Packaging of LV-ACE2, LV-NRP1 & LV-TMPRSS2 in HEK-293T Cells

[0350] For lentiviral packaging, HEK-293T cells were transfected at 90% confluence in a single well of a 6-well plate. Transfection was performed using LIPOFECTAMINE™ 3000 (ThermoFisher Scientific) according to manufacturer's instructions, using 3.6 μg of pCMV delta plasmid DNA (Pinetree), 2.4 μg of pVSV-G plasmid DNA (Pinetree) together with 5 μg of either LV-ACE2 or LV-NRP1 or LV-TMPRSS2 plasmid DNA per well. 24h after transfection media was changed to 1.5 ml of OPTIMEM™ media (GIBCO™) and supernatant containing lentivirus was harvested 48h and 72h after transfection.

[0351] Lentiviral Packaging of LV-ACE2, LV-NRP1 & LV-TMPRSS2 in HEK-293T Cells

[0352] For lentiviral packaging, HEK-293T cells were transfected at 90% confluence in a single well of a 6-well plate. Transfection was performed using LIPOFECTAMINE™ 3000 (ThermoFisher Scientific) according to manufacturer's instructions, using 3.6 μg of pCMV delta plasmid DNA (Pinetree), 2.4 μg of pVSV-G plasmid DNA (Pinetree) together with 5 μg of either LV-ACE2 or LV-NRP1 or LV-TMPRSS2 plasmid DNA per well. 24h after transfection media was changed to 1.5 ml of OPTIMEM™ media (GIBCO™) and supernatant containing lentivirus was harvested 48h and 72h after transfection, filter using a 45 μm filter and stored at −80C until further use.

[0353] Stable Cell Line Generation

[0354] To generate HEK-293T, Vero E6 or other cell lines stably expressing ACE2, NRP1, TMPRSS2 or a combination of the three receptors, cells are plated in their respective complete growth media into a 6-well plate 24 hours prior to viral infection. At the day of infection cells should reach 70-80% confluence. The LV's to be used for transduction are thawed on ice and gradual dilutions (1:10, 1:50, 1:100, 1:500) containing either a single LV or multiple LV's are made in complete growth medium supplemented with polybrene or another transduction enhancing additive. The dilutions are then added to the plated cells (total volume per well 1.5 ml). Following incubation of 48-72h, media is removed and replaced with selection medium containing antibiotics Blasticidin, Zeocin, Puromycin or Hygromycin. The optimal concentration of the respective selection marker varies depending on the cell line and culture conditions and is determined prior to start of selection via treatment of non-transduced parental cells (kill-curve). Cells are selected for 6 to 14 days, or at least as long as it takes the control (untransduced) parental cells to completely die. During selection media containing the respective selection agent is changed every 72h. Once selection is completed, the antibiotic concentration may be reduced or removed entirely.

[0355] Following stable pool generation, further serial dilutions followed by single cell clone expansion may be performed. To confirm adequate transgene expression, stable pools or single cell clones are analyzed using flow cytometry or western blotting.

[0356] Packaging of Lentivirus Pseudotyped with Either SARS-CoV-2 Spike Protein (S) or with VSV Spike G (Control)

[0357] In order to investigate the efficacy of various therapeutics to interfere with SARS-CoV-2 infection, we first generated replication-deficient lentiviruses pseudotyped with either SARS-CoV-2 spike protein (S) or its mutated version, lacking C-terminal 19 amino acids, which is predicted to function as endoplasmic reticulum retention signal. Lentivirus pseudotyped with VSV spike G were packaged in parallel to serve as control. Both the SARS-CoV-2 and the VSV-G pseudotyped lentivirus contain a firefly luciferase and eGFP cassette, which are co-expressed under a CMV promotor in the transduced cells. Therefore, even though both control and SARS-CoV-2 spiked viruses are replication-deficient, viral entry into target cells can be monitored microscopically via detection of eGFP fluorescence as well as via luminescence measurement following incubation of infected cells with media containing luciferin. The plasmids that were used for pseudoviral packaging are listed in Table 15.

TABLE 15
Plasmid list for pseudovirus packaging.

| | | Catalog | |
|---|---|---|---|
| Reagent | Manufacturer | Number | Note |
| pcDNA3.1-SARS-Spike | Addgene | 145032 | Full length S |
| pCMV14-3X-Flag- | Addgene | 145780 | S protein with C- |
| SARS-COV-2 S | | | term 19 aa deletion |
| pCMV delta | Pinetree | | |
| pVSV-G | Pinetree | | |
| II. LV-Fluc-GFP-Puro | Pinetree | | |

[0358] To produce adequate amounts of SARS-CoV-2 lentiviral pseudovirus, a large-scale packaging protocol using PEI as transfection agent was employed as follows:

[0359] Day 1:

[0360] HEK-293T cells are plated into 15 cm plates with approximately 1.4×10⁶ cells.

[0361] Day 2:

[0362] HEK-293T cells in 15 cm plate should reach 70-80% confluency and the medium should be changed to 15 ml pre-warmed complete growth medium 2h prior to transfection. Plasmid DNA, as shown in Table 16 or Table 17, are added to 5 ml OptiMEM. In parallel, 1 μl of 10 mM PEI (Sigma Aldrich #408727) is mixed with 5 ml OptiMEM and filter sterilize through a 0.22 μm filter. The PEI/OptiMEM solution is then added dropwise to the 5 ml of Opti-MEM/DNA mix followed by incubation at room temperature for 20 minutes. After the incubation the 10 ml of the PEI/OptiMEM/DNA mixture are added to each 15 cm plate, taking care not to disrupt the adherent HEK-293T cells, and incubate at 37C, 5% CO₂ overnight.

TABLE 16
Packaging of SARS-CoV-2 Pseudovirus.

| Reagent | Amount per 15 cm plate | |
|---|---|---|
| OptiMEM | 5 | mL |
| LV-Fluc-GFP-Puro | 25 | μg |
| pCMV delta | 18 | μg |
| pcDNA3.1-SARS-Spike | 25 | μg |
| PEI (10 mM) | 1 | μL |
| OptiMEM | 5 | mL |

TABLE 17
Packaging of VSV Spike G Control Virus.

| Reagent | Amount per 15 cm plate | |
|---|---|---|
| OptiMEM | 5 | mL |
| LV-Fluc-GFP-Puro | 25 | μg |
| pCMV delta | 18 | μg |
| pVSV-G | 12 | μg |
| PEI (10 mM) | 1 | μL |
| OptiMEM | 5 | mL |

[0363] Day 3:

[0364] Morning: Change medium to 20 mL pre-warmed complete medium Evening (approximately 24h post transfection): change medium to 11 ml OptiMEM (collection medium).

[0365] Day 4:

[0366] Evening: Collect the medium containing pseudovirus and add 11 mL of fresh pre-warmed collection medium. The collected virus containing medium should be stored at 4° C.

[0367] Day 5:

[0368] Evening: Collect the medium and pool with first collection. Bleach and discard plates. Filter the virus containing collection media using syringe filter with 0.22 μm filter and 60 mL Syringe.

[0369] Concentration and Titration of Lentiviral Vectors

[0370] Following collection and filtration the lentivirus pseudotyped with SARS-CoV-2 spike protein (S) or with VSV spike G (control) is concentrated using ultracentrifugation or using a virus precipitation solution as per manufacturer's instructions (e.g. PEG-it, System Biosciences #LV825A-1). Titration of concentrated lentivirus may be performed using quantitative PCR, flow cytometry (lentiviral vectors used in this protocol express GFP) or via determination of relative vector particle number based on virion RNA as described previously.

### Example 6. Cellular Assay for the Quantitative Measurement of Pseudovirus Transduction in the Presence or Absence of Therapeutic Agents

[0371] Day 1: Cell Plating

[0372] Target cells, such as 293T, 293T-ACE2, 293T-TMPRSS2, 293T-NRP1, 293T-ACE2/TMPRSS2, 293T-ACE2/NRP1, 293T-NRP1/TMPRSS2, which are to be investigated for SARS-CoV-2 lentiviral pseudovirus infectivity, are plated with a density of 5,000 to 10,000 cells per well into black opaque, clear bottom 96-well microplates (ThermoFisher, Nunc #165305) with 50 μl of complete medium and incubated overnight at 37C with 5% CO₂.

[0373] Day 2: Viral Transduction

[0374] Virus transduction in the absence or presence of anti-viral therapeutics:

[0375] Serial dilution of anti-viral agents to be tested are prepared in complete medium.
[0376] To test agents binding to SARS-CoV-2 spike protein S:
   [0377] 5 to 25 μL of concentrated SARS-CoV-2 pseudotyped lentivirus are pre-incubated for 30 minutes with an equal volume of the serial-diluted anti-Spike therapeutic (e.g. anti-Spike monoclonal antibody, ACE2 or NRP1 decoy receptor constructs). After incubation 10 to 40 μL of virus/antibody mixtures containing the different dilutions of anti-Spike therapeutic are added to each well.
[0378] To test agents binding to ACE2, NRP1, TMPRSS2 or other receptor expressed on target cells and expected to be involved in viral transduction:
   [0379] 5 to 25 μL of the serial-diluted anti-receptor therapeutic (e.g. anti-ACE2 mAb) are added to each well containing target cells and incubated for 30 minutes. Following incubation, an equal volume of concentrated SARS-CoV-2 pseudotyped lentivirus is added to each well
[0380] Control wells, containing the same amount of target cells are not treated with therapeutics or pseudoviruses.
[0381] VSV-G pseudotyped lentivirus contain a firefly luciferase and eGFP cassette may be added in similar fashion and serve as another control.

[0382] Following treatment as outlined above, the plates are incubated at 37° C. with 5% CO₂. 48 to 72 hours after transduction, eGFP expression may be observed and quantified using fluorescence microscopy. For luminescence readout, a solution of luciferin in complete medium is prepared of which 50 μL are added per well (final concentration 0.4 mg/mL luciferin) followed by incubation for 20 to 30 minutes. The transduction efficacy is determined via measurement of the transduced cells luciferase activity on a luminescence microplate reader (e.g. ThermoFisher Scientific Varioskan Lux Multimode Microplate Reader). Alternatively, the transduction efficacy may further be measured via flow cytometry and gating for GFP-positive cells.

### Example 7. SARS-CoV-2 In Vitro Vero E6 Based Infectivity and Cytopathic Effects Assay

[0383] To test and analyze the anti-viral activity of test articles against replication active SARS-CoV2 virus in Vero E6 cells, an in vitro inhibition assay may be performed to test and analyze the anti-viral activity of compounds of the present invention against replication active SARS-CoV2 virus in Vero E6 cells.

[0384] Methods

[0385] For example, a modified bioassay protocol of Biological Research Information Center (BRIC) may be used for the testing anti-viral compounds of the present invention. The compounds, e.g., may be those described in Samples 1-4 (described below); all samples may be liquid and soluble in water. The solvent for dilution of Samples 1-3 may be PBS, and for Sample 4 may be DMSO. The cell strain may be Vero E6 cells (ATCC). The virus strain may be SARS-CoV-2 (e.g., NCCP43326; sourced from the Korean CDC).

[0386] Cell culture conditions may be as follows: Cells are cultured in an incubator at 37° C., 95% humidity, 5% CO₂, with conditions monitored every 8 hours. Media and reagent: DMEM, 10% FBS, 1% Pen/Strep, 1% L-Glutamine 200 mM, 1% Sodium Pyruvate 100 mM, Nonessential amino acid. Flask and cell density: Cells may be cultured in 96 well plate with 1×10⁴/well, but cell density can be changed if stable virus is not detected.

[0387] The antivirus assay using the compounds of the present invention may be performed with the following in mind: because the mechanism of action is different from each anti-viral compound, finding standard assay conditions may not practicable. Accordingly, assay conditions may be coordinated on a case-by-case basis (e.g., entry blocker, replication blocker, etc.).

[0388] Virus propagation assays may use active virus with over 10² TCiD50/mL.

[0389] The compounds tested may be serially diluted, 2⁻¹ to 2⁻⁶ in DMEM. The virus can be diluted as follows: Titer of SARS-CoV-2 may be measured before use and 1.0 mL of the virus may be used after 10×-diluted in 4° C. PBS.

[0390] Treatment condition may be as follows: Culture medium of Vero E6 cells in 96 well plates may be removed and washed by 100 μL of PBS two times. Next, 50 μL of serially diluted test articles may be added and 50 μl of the virus (10² TCID50/ml) added for infection.

[0391] Analysis of anti-viral activity of the compounds of the present invention may be evaluated as follows: Cytopathic effect was monitored from 48- to 72-hours post-infection. RNA may be isolated from infected cells and qPCR analysis was used to estimate residual amount of virus

### Example 8. Infectivity Assays

[0392] Infectivity assays may be performed as follows: first, the COVID virus used for efficacy evaluation may be a virus adapted by passage of SARS-CoV-2 (e.g., as sourced from the Korean CDC), three times in Vero E6 cells. Virus (minimum 10³TCID₅₀/mL) may be diluted 10-fold, inoculated into Vero E6 cells, and treated with various concentrations of the compounds provided below at the same time:
[0393] Sample 1: hNRP1ab-hFc (human NRP1 fragment comprising the a and b domains, fused with human IgG1 Fc);
[0394] Sample 2: hNRP1b1b2-his (human NRP1 fragment comprising the b1b2 domain, fused at its C-terminus to a 6× histidine tag);
[0395] Sample 3: hNRP1b1b2-aaa-his (human NRP1 fragment comprising the b1b2 domain containing the Y297A/S346A/Y353A mutations, which reduce VEGF binding, fused at its C-terminus to a 6× histidine tag); and
[0396] Sample 4: Remdesvir (Control).

[0397] Remdesvir is well known to those having ordinary skill in the art, and is available under the tradename “VEKLURY®” (Gilead sciences; CAS No. 1809249-37-3)

[0398] Cell viability and morphology may be observed 48-hours to 96-hours after sample treatment.

[0399] Cytotoxicity results: No cytotoxicity may be observed in the highest concentrations of any of the test substances (data not shown).

[0400] Infectivity results: In the experiment in which the virus culture solution and the test preparation diluent are treated simultaneously, cytopathic effect (CPE) may be observed from 48-hours in the case of the virus-treated group. CPE may not be observed in all dilutions of Samples 1 to 3, and CPE may be observed in Sample 4 at 72-hours after inoculation at a concentration of 1.11 μM.

[0401] Freezing and thawing may be performed twice for each sample at 96-hours to quantitatively evaluate the degree of virus proliferation. For Samples 1, 2 and 3, the lowest dilution factor may be 0.00003 μM, and for Sample 4, RNA may be extracted from the 1.11 μM well where CPE was observed, followed by real-time PCR. These results can be interpreted to have significantly inhibited the infection of viruses and the replication of intracellularly infected viruses without toxicity, and it can be considered that it is necessary to clarify the therapeutic effect in infected animals through animal experiments.

### Example 9. Animal Testing

[0402] Infectivity assays may be performed as follows: SARS-CoV-2 isolates may be propagated in VeroE6 cells in OptiMEM containing 0.3% bovine serum albumin (BSA) and 1 μg of L-1-tosylamide-2-phenylethyl chloromethyl ketone treated-trypsin per mL or in Vero 76 cells in a minimal essential medium (MEM) supplemented with 2% fetal calf serum at 37° C.

[0403] All experiments with SARS-CoV-2 may be performed in enhanced biosafety level 3 (BSL3) containment laboratories or in enhanced BSL3 containment laboratories.

[0404] Experimental Infection

[0405] One-month-old female Syrian hamsters and 7- to 8-month-old female Syrian hamsters may be used in this study. Baseline body weights may be measured before infection. Under ketamine-xylazine anesthesia, four hamsters per group may be inoculated with 10⁵-6 PFU (in 110 μL) or with 10³ PFU (in 110 L) of a SARS-CoV-2 isolate via a combination of intranasal (100 μL) and ocular (10 μL) routes. Body weight may be monitored daily for 14 days.

[0406] For virological and pathological examinations, two, four, or five hamsters per group may be infected with 105.6 PFU (in 110 μL) or with 103 PFU (in 110 μL) of the virus via a combination of the intranasal and ocular routes; 3, 6, and 10 d postinfection, the animals may be killed, and their organs (e.g., nasal turbinates, trachea, lungs, eyelids, brain, heart, liver, spleen, kidneys, jejunum, colon, and blood) may be collected.

[0407] For the reinfection experiments, three hamsters per group may be infected with 105.6 PFU (in 110 μL) or with 103 PFU (in 110 μL) of SARS-CoV-2 or PBS (mock) via a combination of the intranasal and ocular routes. On day 20 postinfection, these animals may be reinfected with 105.6 PFU of the virus via a combination of the intranasal and ocular routes. On day 4 after reinfection, the animals can be killed, and the virus titers in the nasal turbinates, trachea, and lungs can be determined by means of plaque assays in VeroE6/TMPRSS2 cells.

[0408] For the passive transfer experiments, eight hamsters may be infected with 105.6 PFU (in 110 μL) or with 103 PFU (in 110 μL) of SARS-CoV-2 via a combination of the intranasal and ocular routes. Serum samples may be collected from these infected hamsters on day 38 or 39 postinfection, and may be pooled. Control serum can be obtained from uninfected age-matched hamsters. Three hamsters per group may be inoculated intranasally with 103 PFU of SARS-CoV-2. On day 1 or 2 postinfection, hamsters may be injected intraperitoneally with the postinfection serum or control serum (2 mL per hamster). The animals may be killed on day 4 postinfection, and the virus titers in the nasal turbinates and lungs may be determined by means of plaque assays in VeroE6/TMPRSS2 cells. All experiments with hamsters may be performed in accordance with the Proper Conduct of Animal Experiments and corresponding guidelines in addition to an approved protocol.

### Example 10. In Vivo Efficacy of SEQ ID NO: 122 on SARS-CoV-2 in Hamsters

[0409] Methods

[0410] The in vivo efficacy of SEQ ID NO: 122 on SARS-CoV-2 in hamsters was evaluated.

[0411] The present example included six arms with four hamsters per group. The animals were all male Syrian Golden hamsters obtained from Charles River Laboratories, weighing approximately 60-70 grams. The hamsters were weighed daily from inoculation through day 4, and again on day 7 when euthanized. On days 0, 2, 4 and 7 plethysmography (PFT) recordings were obtained after acclimation, for a period of 20 minutes after which (under isoflurane anesthesia) 100 μL of blood was collected from either the jugular vein or anterior vena cava.

[0412] A Blood was collected and plethysmography (PFT) performed on day 0 prior to intra-tracheal viral inoculation with a given challenge. Animals were anesthetized with ketamine/xylazine at a dose of 133 mg/kg and 13.3 mg/kg, respectively, followed by viral challenge. Viral challenge was administered with an intra-tracheal viral inoculum of Severe acute respiratory syndrome-related coronavirus 2 (SARS-CoV-2), isolate USA-WA1/2020 consisting of either 51 plaque forming units (PFU), or 510 PFU in 50 μL of EMEM. Controls included a non-viral control, consisting of 50 μL of EMEM; and a positive control consisting of SAD-S35 (anti-SARS-CoV-2 RBD Neutralizing Antibody, Human IgG1) (see information regarding SAD-S35 below).

[0413] The six arms evaluated were as follows:
[0414] Arm (1) Non-viral EMEM control followed by 0.5 mL PBS with 250 mM NaCl given at 12- and 24-hours post-inoculation (PI);
[0415] Arm (2) 51 PFU followed by 0.5 mL PBS with 250 mM NaCl given at 12- and 24-hours PI;
[0416] Arm (3) 510 PFU followed by 0.5 mL PBS with 250 mM NaCl given at 12- and 24-hours PI;
[0417] Arm (4) 51 PFU followed by SEQ ID NO: 122 intraperitoneal injection (15 mg/kg) given at 12- and 24-hours PI;
[0418] Arm (5) 510 PFU followed by SEQ ID NO: 122 intraperitoneal injection (15 mg/kg) given at 12- and 24-hours PI; and
[0419] Arm (6) 510 PFU followed by SAD-S35 intraperitoneal injection (15 mg/kg) given at 12- and 24-hours PI.

[0420] SAD-S35 (anti-SARS-CoV-2 RBD Neutralizing Antibody, Human IgG1) was used as positive control. SAD-S35 is a specific antibody against SARS-CoV-2 Spike protein RBD domain. SAD-S35 is isolated from a SARS-CoV-2 infected patient and is recombinantly produced from human 293 cells (HEK293). SAD-S35 is available from ACROBiosystems (1 Innovation Way, Newark, DE 19711; Catalog No. SAD-S35).

[0421] On day 7 after plethysmography recording, hamsters were euthanized using 0.1 mL IP Euthasol® (Euthanasia Solution comprising pentobarbital sodium and phenytoin sodium), blood was collected, bronchoalveolar lavage was performed with 1.5 mL PBS, and lungs were inflated with 1.5 mL of 10% neutral buffered formalin and subsequently fixed for Hematoxylin and eosin (H&E) staining.

[0422] Animal weight was charted in Excel. Plethysmography data is presented as log Penh, ln Rpef and square root EF50 in the standard format published in rodent viral spirometry literature known to those having ordinary skill in the art.

[0423] RT-qPCR was performed on RNA isolated from blood samples and bronchoalveolar lavage fluid (BAL) obtained using Qiagen Viral RNA isolation kits. The CDC TaqMan® assay primer/probe sequences and conditions targeting the SARS-CoV-2 viral nucleocapsid protein were used in an ABI QuantStudio 3 thermal cycler. Promega GoTaq® RT-PCR, and cloned standards of the virus nucleocapsid were used to quantify genome copies.

[0424] Results

[0425] During viral inoculation hamster No. 8 died in the 51 PFU saline treatment group, and at the end of the experiment data from hamster 4 (media inoculation only, PBS Injections) was digitally corrupt in the nonviral group and could not be used, leaving 3 animals in each of these control groups. All other groups contained four hamsters.

[0426] No significant weight changes were observed between groups. FIGS. 8 and 9. Poor weight gain in the first 1-2 days PI was seen in all groups, and weight loss occurred day 1 PI in the non-viral control. However, all animals continued to gain weight throughout the remainder of the study. Because the non-viral control group experienced the only significant change in body weight gain from day 0 to day 1, no adverse effect due to treatments or viral inoculation were detected between groups.

[0427] Plethysmography

[0428] Analysis of three calculated parameters from whole body plethysmography were used to characterize the effects of viral infection and treatment on respiratory physiology. The three parameters were Enhanced pause (Penh); Rpef, and EF50.

[0429] Enhanced pause (Penh) is a unit-less index of calculated airway function. Penh calculations were performed according to the following formula:

$$Penh = \frac{PEF}{PIF} \times \frac{Te - Tr}{Tr} \qquad Formula ( I )$$

[0430] Wherein PEF is peak expiratory flow of breath; PIF is peak inspiratory flow of breath; Te is time of expiratory portion of breath; and Tr is time required to exhale 65% of breath volume. Penh serves as an indirect measure of airway resistance and provides a non-specific assessment of breathing patterns.

[0431] The equation for Penh takes into account four breathing parameters including: peak expiratory flow of breath (PEF); peak inspiratory flow of breath (PIF); time of expiratory portion of breath (Te); and time required to exhale 65% of breath volume (Tr). Penh serves as an indirect measure of airway resistance and provides a non-specific assessment of breathing patterns.

[0432] FIG. 10 is a graphical representation of the respiratory cycle, showing various measurements that are used for calculation of the respiratory parameters used for comparison between the groups in this study.

[0433] “Rpef” measures the ratio of the time to peak expiratory follow (PEF) relative to the total expiratory time. Rpef is calculated according to the following equation:

$$Rpef = \frac{Time to PEF}{Te} \qquad Formula ( II )$$

[0434] Wherein PEF is peak expiratory follow; and Te is total time of expiration.

[0435] This calculated parameter is lower in chronic obstructive pulmonary disease and SARS-CoV-1 infection when the terminal portion of a breath is obstructed from volume depletion due to airway constriction. FIG. 11.

[0436] EF50 is flow rate (mL/seconds) at 50% volume. EF50 is similar to Rpef, and is sensitive to airway constriction during expiration; however, changes in expiration are detected in the later portion of the expiratory cycle. This calculated parameter is shortened in SARS-CoV-1 and lengthened with asthma. FIG. 12.

[0437] The three calculated parameters were mathematically transformed: Penh to log Penh, Rpef to ln Rpef, and EF50 to the square root of EF50, pursuant to conventional means known by those in the art when presenting data of this type.

[0438] The results of the plethysmography data from the 51 PFU-treated and 510 PFU-treated group of hamsters are shown in FIGS. 13 and 14.

[0439] Log Penh data in the 51 PFU groups demonstrate that both SEQ ID NO: 122 and untreated arms returned to baseline values after 7 days with no residual significant change in respiratory parameters. FIG. 13. A greater deviation from its own baseline values was seen on day 2 in the SEQ ID NO: 122 group than in the untreated group that deviated most on day 4, however this was not statistically significant. There is a significant difference between the 51 PFU treated and untreated groups on day 7 (T-test, T=3.998, p<0.01), meaning that the SEQ ID NO: 122 treated group continued to return toward baseline whereas the untreated group changed progressively at the end of the study from their baseline values.

[0440] A significant difference (T-test, T=6.058, P<0.001) exists on day 7 between the SEQ ID NO: 122 treated group and the non-viral challenge control. The log Penh parameter remained relatively unchanged in the non-viral control group over the duration of the experiment. In contrast the 510 PFU challenge resulted in a persistent deviation of log Penh from baseline greatest in the untreated arm, to a lesser extent in the SEQ ID NO: 122 treated arm, and even less in the SAD-S35 antibody treated arm. A significant difference exists between log Penh in the SAD-S35 treated group and the untreated viral group on day 4 (T-test, T=2.544, P<0.05), no other statistical relevance was found between arms in the 510 PFU challenge.

[0441] In the ln Rpef data, the 510 PFU challenge reveals an effect of treatments more accentuated than measured in the 51PFU challenge group. FIGS. 15 and 16. 51 PFU challenge without treatment shows a persistent change in the ln Rpef parameter when compared to the SEQ ID NO: 122 treated arm, which is returning toward baseline values. On day 4 there is a statistically significant difference between the non-viral control arm and the 51 PFU arm treated with SEQ ID NO: 122 (T-test, T=2.75, P<0.05). On day 7 there is a statistically significant difference between ln Rpef of the non-viral control and the 51 PFU challenge arms without treatment (T-test, T=2.775, P<0.05). The 510 PFU challenge shows lesser deviation from baseline values for treated groups (SEQ ID NO: 122 and SAD-S35) when compared to the untreated arm. Rpef is largely derived from changes in the final portion of expiration when airway constriction slows the time to final expiration.

[0442] The final parameter examined, square root of EF50, demonstrated little to no changes in both challenge groups, with and without treatments. There are no statistically significant differences on any day between arms in the 51 PFU and 510 PFU challenge arms. FIGS. 17 and 18. This parameter is sensitive to the initial portion of expiration that changed little if at all during SARS-CoV-2 infection.

[0443] RT-qPCR

[0444] Heparinized blood was diluted 1:10 in PBS prior to storage at −80° C. 140 μL was used to isolate total RNA from non-viral control group, 51 PFU PBS-treated and 510 PFU PBS-treated controls. One microliter of the isolated RNA was subjected to CDC RT-qPCR for viral nucleocapsid and the results compared to cloned standards. No SARS-CoV-2 genomic copies were detected in any of the samples, whereas the controls functioned as expected, and so the remaining samples were not tested.

[0445] Histology

[0446] Histology slices obtained from the lungs of a representative hamster selected from of each of the study arms are shown in FIGS. 19-24. The histology sections were fixed and stained seven days from viral or media challenge after bronchoalveolar lavage was performed. No inflammation was present in the media inoculated control arm (FIG. 19) compared with a few areas of mild-moderate chronic-active inflammation in the 51 PFU arm (FIG. 20). Several areas of more severed chronic-active inflammation were observed in the 510 PFU arm. FIG. 21.

[0447] In the 51 PFU- and 510 PFU-treated tissue, areas of inflammation contained lymphocytes and plasma cells predominantly, and in lesser numbers macrophages containing cellular debris and neutrophils. FIGS. 20-21. Rarely syncytia of terminal bronchiolar epithelial cells could be seen.

[0448] Treatment with SEQ ID NO: 122 did not reduce the areas of inflammation in the 51 PFU or the 510 PFU arms. FIGS. 22-23. Similarly, treatment with the antibody, SAD-S35, did not reduce the size or severity of inflammation in the 510 PFU arm. FIG. 24.

[0449] Quantitative RT-PCR on Bronchoalveolar Lavage (BAL) Fluid

[0450] One mL of PBS was used to lavage the lungs after euthanasia on day 7. Total RNA was isolated from 140 μL of BAL, and eluted in 50 μL; from this, 1 μL was subjected to RT-qPCR for SARS CoV-2 nucleocapsid gene using the U.S. CDC Real-Time Reverse Transcription PCR Panel for Detection of Severe Acute Respiratory Syndrome Coronavirus 2 (https://www.cdc.gov/coronavirus/2019-ncov/lab/rt-pcr-panel-primer-probes.html).

[0451] The results of the RT-qPCR assay are shown in the table below.

TABLE 18
Quantitative RT-PCR results. Group No. corresponds
to six arms described in the methods above, and
briefly summarized in the treatment column.

| Group | | Animal | Copies/ | Average | STD. DEV. |
|---|---|---|---|---|---|
| No. | Treatment | ID | μL | Copy/μL | Copies/μL |
| 1 | EMEM control | 1 | 0 | 0 | 0 |
| | PBS treatment | 2 | 0 | | |
| | | 4 | 0 | | |
| 2 | 51 PFU | 5 | 1144 | 389 | 654 |
| | challenge | 6 | 21 | | |
| | PBS treatment | 7 | 1.5 | | |
| 3 | 510 PFU | 9 | 36 | 720 | 1211 |
| | challenge | 10 | 214 | | |
| | PBS treatment | 11 | 2534 | | |
| | | 12 | 97 | | |
| 4 | 51 PFU | 13 | 70 | 47825 | 93777 |
| | challenge | 14 | 71 | | |
| | SEQ ID NO: | 15 | 2680 | | |
| | 122 treatment | 16 | 188478 | | |
| 5 | 510 PFU | 17 | 343 | 5883 | 11078 |
| | challenge | 18 | 122 | | |
| | SEQ ID NO: | 19 | 22498 | | |
| | 122 treatment | 20 | 569 | | |
| 6 | 510 PFU | 21 | 43 | 809 | 1335 |
| | challenge | 22 | 391 | | |
| | SAD-S35 | 23 | 7 | | |
| | treatment | 24 | 2794 | | |

[0452] No virus was detected in the EMEM inoculated control group (Group 1). No significant difference was detected by single factor ANOVA (F=0.788, F critical=3.326, df within groups=5, df between groups=10). The lack of statistical difference is the result of substantial standard deviation in copy numbers of the nucleocapsid gene. In general, the standard error of each group was greater than or equal to the group average, due to a single outlier in copy number in BAL. Individual one-tailed T-test comparison of challenge vs challenge+treatment failed to demonstrate a significant difference in the quantity of nucleocapsid copies per microliter of RNA isolated from BAL.

[0453] Discussion

[0454] The beneficial effects of treatment with SEQ ID NO: 122 and SAD35 that were noted in the plethysmography data do not seem to correlate with the degree of inflammation seen histologically. There could be several reasons for this, including: the drugs diminished the inflammatory response earlier in the infection when histologic evaluation was not done; the airway resistance during expiration was diminished by the drug treatment, alleviating some degree of airway constriction, while having no effect on inflammation; and/or the treatments changed the development of early fibrosis that began during the bronchopneumonia allowing better pulmonary compliance.

[0455] The small but significant beneficial effects of the treatments may have been muted since the pharmacokinetics of SEQ ID NO: 122 and SAD35 in the hamster are not known. If the half-life of these treatments in the hamster is short, or if the minimum inhibitory concentration for viral replication of the compounds is higher than was achieved, then SARS-CoV-2 viral replication may have been temporarily slowed or impaired in a manner insufficient to stop the ensuing inflammatory response. The SAD35 IgG antibody that blocked SARS-CoV-2 viral replication in vitro likely did not achieve sufficient levels in the alveolar spaces to completely inhibit viral replication since this is not a secreted antibody.

[0456] Analysis of BAL fluid for SARS CoV-2 nucleocapsid gene targets per microliter of RNA isolated from by RT-qPCR showed no significant difference between the titer of viral challenge with PBS vs. SEQ ID NO: 122 or SADS35 treatment. In general, one hamster in each group showed a high copy number this being most significant in the SEQ ID NO: 122 treated animals.

### Example 11. In Vivo Efficacy of VT116, VT114, and VT130 on SARS-CoV-2 in Hamsters

[0457] In this example, young male hamsters weighing 95-100 grams were purchased with jugular catheters, and treated by intravenous (IV) administration of SEQ ID NO: 122, SEQ ID NO: 154, and SEQ ID NO: 192, after being confronted with 1500 PFU SARS-CoV-2 intra-tracheal challenge.

[0458] Challenge virus was diluted to a concentration of 100 PFU/μL, and 15 μL were given intra-tracheal (IT) per os. The present example had five arms (three drug administration groups n=5 each, and two control groups n=4). Hamsters were monitored daily measuring body weight, determining a clinical illness score. Whole body plethysmography (PFT) was recorded for each hamster on days 0, 2, 4 and 7. Serum levels of Interferon gamma (IFNγ) were determined from blood collected on days 0, 2, 4 and 7. RT-qPCR targeting the nucleocapsid gene was performed on the following samples: oropharyngeal swabs taken on days 2 and 4, bronchoalveolar lavage fluid (BAL) collected from one hamster in each group on day 4 and the remaining hamsters on day 7. RT-qPCR was also performed on RNA extracted from samples of olfactory bulbs.

[0459] All hamsters were euthanized on day 7; bronchoalveolar lavage was performed using 1.5 mL PBS, lungs were then fixed for histology, and olfactory bulbs were dissected. The virus control group was administered IT virus and received IV saline administration after SARS-CoV-2 challenge. The sham infection control group was administered 15 μL DMEM IT followed by IV saline treatment.

[0460] Each of the compounds were given at a dosage of 15 mg/kg, which was in a volume of less than 0.7 mL. Control animals received 0.5 mL of IV 250 mM saline. The compounds, or saline, were administered IV at 12 hours, 24 hours, and 48 hours after IT virus challenge.

[0461] Methods

[0462] All hamsters were weighed and observed at least once daily throughout the study. PFT was performed on days 0, 2, 4, and 7, after weighing the animals. The morning of day 0, after weighing and obtaining PFT, the hamsters were anesthetized with intraperitoneal ketamine/xylazine anesthesia (133 mg/kg and 13.3 mg/kg, respectively). Once anesthetized, the hamsters were suspended by their incisor teeth on an inclined board and the glottis was visualized using trans-tracheal illumination. Next, 5 μL of a 2% lidocaine solution was placed on the glottis for 30 seconds, followed by the placement of an IT 18 gauge catheter. The position of the catheter in the trachea was confirmed by observing breath condensate on a chilled dental mirror held at the catheter opening. After confirmation of catheter position, 15 μL of viral inoculum containing 1500 PFU, or 15 μL of DMEM for the non-viral control, were administered through the IT catheter using a 100 μL gel-loading pipet tip. After the gel loading tip was removed, one milliliter of air was forced through the IT catheter into the lung to help disseminate the inoculum, the catheter was removed and the hamster allowed to recover from anesthesia

[0463] Viral inoculum was severe acute respiratory syndrome-related coronavirus 2 (SARS-CoV-2), isolate USA-WA1/2020 obtained from BEI Resources (www.beiresources.org).

[0464] The hamsters had jugular catheters that were maintained by removal of anti-coagulant solution (25% dextrose with heparin at 500 U/mL) at each manipulation (catheter volume 41 μL); then, after drawing blood or administering treatments, the catheter was flushed with 250 μL saline and the heparin-dextrose solution replaced.

[0465] Each time the hamsters were manipulated for blood collection or substance injection, they were anesthetized with isoflurane. The hamsters were weighed and administered 15 mg/kg of a given treatment, or saline, via the jugular catheter at 12-hours, 24-hours and 48-hours after viral inoculation. On days 0, 2, 4 and 7, after body weight was collected, PFT was recorded for a period of 20 minutes; this was then followed by isoflurane anesthesia and collection of 500 μL of blood for analysis of select cytokines. Finally, a throat swab was taken (on day 2 and day 4), or BAL (day 7) after euthanasia. The five study arms were as follows
[0466] Arm (1) Non-viral DMEM control given IT followed by IV 0.5 mL saline;
[0467] Arm (2) Non-treatment control, 1500 PFU SARS CoV-2 (WA-1) IT followed by IV sterile 250 mM NaCl;
[0468] Arm (3) 1500 PFU followed by SEQ ID NO: 122 IV at 15 mg/kg;
[0469] Arm (4) 1500 PFU followed by SEQ ID NO: 154 IV at 15 mg/kg; and
[0470] Arm (5) 1500 PFU followed by SEQ ID NO: 192 IV at 15 mg/kg;

[0471] Hamsters were euthanized and samples collected on days 4 and 7. On day 4, after recording plethysmography and weight, one hamster in each group was euthanized using 0.1 mL IP Euthasol®; the remaining hamsters were euthanized on post-inoculation day 7. After euthanasia, blood was collected for IFNγ determination, and the trachea was dissected and cannulated followed by BAL collection and fixation of the lung. BAL collection consisted of 1.5 mL saline infused into the lungs and then withdrawn. RNA extracted from BAL was used for RT-qPCR to determine a relative quantity of SARS-CoV-2 in the lungs. After BAL collection, the lungs were distended with 3 mL of 10% neutral buffered formalin via the tracheal cannula and submitted for paraffin embedding and H&E staining. Additionally, the olfactory bulb was dissected from the brain for RNA extraction and SARS CoV-2 detection.

[0472] PFT is presented as Penh, Rpef and EF50 in a standard format published for rodent viral spirometry, and as calculated in the example above. Throat swabs (cotton tip) were placed in 175 μL of PBS and vortexed for 15 seconds; next, 140 μL was used for RNA extraction. RNA was extracted from throat swabs and BAL using Qiagen Viral RNA isolation kits. RNA was extracted from olfactory bulbs using Qiagen RNeasy and Qia-shredder columns.

[0473] The TaqMan® assay primer/probe sequences and reaction conditions targeting the SARS-CoV-2 viral nucleocapsid used in this study was published by the CDC (see above). The TaqMan® assay was performed on an ABI QuantStudio 3 thermal cycler using Promega GoTaq® RT-PCR. The amplicon produced by the primers was cloned into the plasmid pCR4 and used as quantitative standards to determine the number of genome copies in one microliter of RNA extracted from swabs, BAL or tissue. Cytokine analysis for IFNγ, Tumor Necrosis Factor Alpha (TNFα), angiotensin II, and angiotensin 1-7 was performed by antigen capture ELISA using kits obtained from MyBioSource and Genorise Scientific.

[0474] Results

[0475] No significant weight loss occurred in any of the experimental groups (or individuals). FIG. 25.

[0476] Viral Titer

[0477] Viral titer detected as nucleocapsid gene copies/μL RNA extracted from throat swabs or BAL was highest on day four after IT inoculation. FIG. 26. The viral control group had a large standard deviation of titer ranging from 807-17,158 PFU eluted from throat swabs taken on day four. On day 7 RT-qPCR was performed on 140 μL of BAL, however by that time the copy number was minimal in all groups (<17PFU/μL). Each compound treatment groups had maximal viral copy numbers in samples taken on post-inoculation day 4 post-inoculation and those copy numbers were lower than detected in the viral challenged non-treatment control. FIG. 26.

[0478] Additionally, RT-qPCR detected the presence of SARS CoV-2 genome in the olfactory bulb portion of the brain in all groups except the medium control group. Treatment with the compounds did not result in a decrease of viral nucleocapsid gene copy number detected by RT-qPCR in the RNA extracted from olfactory bulb when compared with the untreated virus controls. FIG. 27. The copy number was greatest in RNA extracted from VT116 treated hamsters, followed by VT130 treated, SEQ ID NO: 122 and virus challenge untreated control. Whether this represents infectious, replication competent, SARS CoV-2 in the brain was not determined, but the greater copy number in treatment groups is noteworthy.

[0479] On Day 7 when SARS CoV-2 could no longer be detected in the BAL collected from the mice, the genome was present in the olfactory bulb of the brain (see below).

[0480] Whole Body Plethysmography

[0481] There was a significant difference between PFT testing results between the compound treatment groups and the viral control group on day 2 post-inoculation (T-test, P<0.01 SEQ ID NO: 122 and SEQ ID NO: 154, p<0.05 VT130). FIGS. 28-30. This difference was not retained on days 4 and 7 when comparing groups. The significant difference detected on day 2 may be related to the administration of the test compounds since a single adverse reaction was seen to SEQ ID NO: 192 in a single animal. The decrease in EF50 value of treatment groups compared with controls, is related to a shorter duration of time to expire 50% of a breath in the treatment groups. FIG. 28. This shorter duration is physiologically related to decreased resistance to moving the breath, an absence of bronchoconstriction, this could be a direct effect on the airway smooth muscle, or an indirect effect in diminishing pulmonary inflammation.

[0482] Plasma Cytokine Values

[0483] Interferon-gamma (IFNγ) levels increased in all virus inoculated groups reaching peak values on day 2 in the virus control group, and in the SEQ ID NO: 122 treated and SEQ ID NO: 192 groups. FIG. 31.

[0484] The IFNγ plasma levels peaked on day four in the SEQ ID NO: 154treatment group (500 μg/mL plasma). These levels decreased to near baseline in the SEQ ID NO: 122 group by day 7, and in the SEQ ID NO: 192 group by day 4, however in the SEQ ID NO: 192 and SEQ ID NO: 154 groups there was a paradoxical rise in IFNγ levels on day 7. This may be related to the copies of the viral genome detected in the brain of hamsters on day 7 in the SEQ ID NO: 154 and SEQ ID NO: 192 treatment groups. The virus control group did not return to baseline IFNγ levels values by the end of the study. Tumor Necrosis Factor alpha (TNFα) levels were also measured but were inconclusive (data not shown).

[0485] Angiotensin 1-7 levels decreased in all groups through the study, the decrease was significant between the virus control group and the media control groups (T-test, two-tailed, p<0.05). FIG. 32. The decrease was statistically significant between the media control group and all other groups on post-inoculation day 2, but only between levels determined in the two control groups on day 7. By comparison angiotensin II levels decreased in a similar manner in all groups over the course of the study, but these decreases were not statistically significant. FIG. 33.

[0486] Angiotensin II (Ang II) is involved in regulation of blood pressure and is converted to angiotensin 1-7 by the angiotensin converting enzyme type 2 (ACE2), the receptor used by SARS CoV-2 to attach to cells. People with hypertension are more susceptible to adverse outcomes from the coronavirus, so we felt it prudent to examine these metabolites. The ratio of these metabolites (Ang II/Ang 1-7) is shown in FIG. 34, and is significantly different between the control groups, with the ratio resolving in the treatment groups closer to that of the media control throughout the experiment.

[0487] Histopathology

[0488] Hamsters in all groups, with the exception of the medium sham inoculated controls, had pulmonary lesions best described as chronic-active multifocal bronchopneumonia with perivascular edema. There was substantial type 2 pneumocyte proliferation in the affected areas of lung. Very infrequently found was thrombosis in small arteries in areas where the vessels were surrounded by focal intense inflammation. The histopathologic lesions were scored using the following scheme: (a) Lesion distribution: none=0, focal=1, multifocal=2, diffuse=3; (b) Inflammation intensity: none=0, mild (2-3 inflammatory cells thick)=1, moderate (inflammatory cells=3-20 cells thick), severe (inflammatory cells>20 cells thick); (c) Small vessel thrombosis: absent=0, present=1. FIGS. 35-36.

[0489] Conclusion

[0490] Several things are notable in this study. First is the initial spike in IFNγ two days after viral challenge, which decreased prior to the peak viral load detected on day 4 post-inoculation. Typically IFNγ levels will continue to be elevated during viral replication. Second is that viral copy number per microliter on day 7 diminishes to near zero in BAL but inflammation of the lung continues to be a florid level in the absence of the virus. Third, although viral copy number diminished on day 7 to near zero in BAL, viral copies were detected in the olfactory bulbs of the animals, although we did not test if these copies are associated with infectious virus or only detecting viral nucleic acid.

[0491] Treatment of hamsters with any of the three compounds decreased the IFNγ level when compared with viral controls (however, statistical significance could not be determined due to small group size and variability of measurements between individuals). Plethysmography data shows that SEQ ID NO: 122 and SEQ ID NO: 192 help the hamsters achieve respiration closer to the normal when compared to media control and virus control groups. Finally, viral titers in olfactory bulb lingered at higher values in SEQ ID NO: 192 treated hamsters on day 7 when compared with viral controls and SEQ ID NO: 122 or SEQ ID NO: 154. Viral titers on day 4 were diminished in treatment groups when compared viral controls (when corrected by removal of data from a single outlier in the SEQ ID NO: 192 treatment group). Histologically, no difference was apparent between treatments and viral control groups in the distribution or severity of pulmonary inflammation-perhaps due to the on-going inflammatory response even in the absence of virus in BAL. Because the treatments being administered focus on interference with viral entry into cells, the inflammatory response once initiated seems to be disconnected from the on-going presence of the virus and therefore inflammation once started is unaffected by the treatment.

[0492] Finally, the significance of the imbalance of angiotensin II to angiotensin 1-7 conversion as a potential cause of the residual inflammation of the lung when the virus is minimal or no longer present was assessed via the Ang II/Ang 1-7 ratio. Treatment with SEQ ID NO: 122 and to a greater extent SEQ ID NO: 192 kept that ratio normal or improved, when compared to virus control; albeit without apparent decrease in pulmonary inflammation.

### Example 12. K18-ACE2 Mouse Study

[0493] Introduction

[0494] Young female K18-ACE2 (JAX) mice weighing between 20-25 grams were treated with intraperitoneal (IP) administration of SEQ ID NO: 113; an antibody that binds a SARS-CoV-2 spike protein, said antibody having a heavy chain comprising the amino acid sequence set forth in SEQ ID NO: 189 and a light chain comprising the amino acid sequence set forth in SEQ ID NO: 190 (anti-SARS-CoV-2 spike protein antibody); or saline after 1,250 PFU SARS-CoV-2 (Strain B1.351) given by intranasal challenge. The intraperitoneal (IP) drug administration began 12-hours prior to viral challenge, and was continued with a subsequent dose 12-hours after challenge, and 24-hours after challenge.

[0495] At viral challenge the compound was mixed with the virus in a volume of 50 μL and incubated for 15 minutes at 37° C. prior to intranasal administration to mice under isoflurane anesthesia. For SEQ ID NO: 113, due to the concentration of the compound, the volume of intranasal administration was 83 μL to achieve 15 mg/kg.

[0496] The following four arms were evaluated:
[0497] Arm (1): Virus inoculation with SEQ ID NO: 113 (15 mg/kg) administration group n=13 each;
[0498] Arm (2): Virus inoculation with anti-SARS-CoV-2 spike protein antibody (1.2 mg/kg) administration group n=13 each;
[0499] Arm (3): Cell culture medium intranasal control with IP saline administration n=6;
[0500] Arm (4): Virus inoculated with IP saline administration n=6.

[0501] Mice were monitored daily measuring body weight and assessing an objective clinical illness score.

[0502] Mice were euthanized on the following schedule: Day 0 two hours after drug administration; day 1, day 2, and day 4: arm 1 n=2; arm 2 n=2, arm 3 n=1 and arm 4 n=1. The remaining mice were euthanized on day 7.

[0503] Prior to euthanasia mice were weighed and clinically scored. Under anesthesia blood was collected. After euthanasia bronchoalveolar lavage (BAL) was performed using 1 mL of sterile phosphate buffered saline, and lungs were insufflated with 1 mL formalin and fixed.

[0504] RNA was isolated from all BAL samples using Qiagen RNeasy for Viral RNA and quantified and heated to 60° C. for 20 minutes. Serum was tested for mouse fibrin degradation products and D-dimer using kits from MyBiosource.

[0505] Results

[0506] FIG. 37 shows the body weights of the mice in the four arms. Viral inoculated mice in arms 1 and 4 began to show signs clinical signs of illness by day 4, a few succumbed to the viral infection, and the remainder were all ill by day 7 at study termination.

[0507] The clinical scores paralleled the changes in body weight as the mice began to show signs of illness on day 5. FIG. 38. This slower progression to clinical illness and weight loss was due to the slower nature of the South African variant of SARS CoV-2 both in vitro and in vivo compared to the WA-1 strain of the virus.

[0508] The clinical scores paralleled the changes in body weight as the mice began to show signs of illness on day 5. This slower progression to clinical illness and weight loss was due to the slower nature of the South African variant of SARS CoV-2 both in vitro and in vivo compared to the WA-1 strain of the virus.

[0509] Using a mixed model statistical analysis on the body weight data there is a significant difference between the placebo control and the virus control (p<0.001), and between the placebo control and the SEQ ID NO: 113 treated mice (p<0.05). There no statistical difference between the placebo control and the anti-SARS-CoV-2 spike protein antibody treated mice, though the data was trending in the direction of a difference were the study to have gone on longer.

[0510] Using a mixed model statistical analysis on the clinical score data there is a significant difference between the placebo control and the virus control (p<0.01) and between the placebo control and the SEQ ID NO: 113 treated mice (p<0.05) on day 6. On day 7 significant differences existed between the following groups: placebo vs. virus control (p<0.01), placebo vs. SEQ ID NO: 113 (P<0.01), SEQ ID NO: 113 vs. virus control (p<0.05) and SEQ ID NO: 113 vs. anti-SARS-CoV-2 spike protein antibody (p<0.05). There was no statistical difference between the SEQ ID NO: 113 vs. virus control, or between placebo vs. anti-SARS-CoV-2 spike protein antibody treated mice on any day.

TABLE 19
BAL RNA concentrations (ng/μL). Here, RNA
isolated from BAL fluid from each mouse is shown.

| Mouse No. | Treatment | Day 0 | Day 1 | Day 2 | Day 4 | Day 7 |
|---|---|---|---|---|---|---|
| 6 | Placebo | 93.6 | | | | |
| 7 | Virus | 105.8 | | | | |
| 24 | VT01 | 88.7 | | | | |
| 27 | VT01 | 102.5 | | | | |
| 39 | VT01R | 100.9 | | | | |
| 40 | VT01R | 103.7 | | | | |
| 38 | VT01R | | 102.1 | | | |
| 37 | VT01R | | 95.1 | | | |
| 25 | VT01 | | 102.3 | | | |
| 26 | VT01 | | 105.7 | | | |
| 14 | Virus | | 84.3 | | | |
| 5 | Placebo | | | 93.4 | | |
| 8 | Virus | | | 91.5 | | |
| 23 | VT01 | | | 97.1 | | |
| 22 | VT01 | | | 95.9 | | |
| 35 | VT01R | | | 92.4 | | |
| 36 | VT01R | | | 98.1 | | |
| 13 | Virus | | | | 100.2 | |
| 20 | VT01 | | | | 92.6 | |
| 21 | VT01 | | | | 106.3 | |
| 33 | VT01R | | | | 101.4 | |
| 34 | VT01R | | | | 90.3 | |
| 15 | VT01 | | | | | 100.3 |
| 1 | Placebo | | | | | 93.4 |
| 2 | Placebo | | | | | 92.2 |
| 3 | Placebo | | | | | 98.3 |
| 4 | Placebo | | | | | 93.1 |
| 9 | Virus | | | | | 76 |
| 10 | Virus | | | | | 95.5 |
| 11 | Virus | | | | | 102.6 |
| 12 | Virus | | | | | 95.9 |
| 16 | VT01 | | | | | 47.2 |
| 17 | VT01 | | | | | 114.4 |
| 18 | VT01 | | | | | 123.5 |
| 19 | VT01 | | | | | 92.6 |
| 28 | VT01R | | | | | 44.8 |
| 29 | VT01R | | | | | 93.3 |
| 30 | VT01R | | | | | 96.4 |
| 31 | VT01R | | | | | 96.7 |
| 32 | VT01R | | | | | 93.9 |

[0511] Microthrombosis

[0512] Fibrin degradation products (FDP) and D-dimer were used as an indicator of microthrombosis. Fibrin degradation products and D-dimer were measured in serum of all mice (except those found dead). FIGS. 39-40.

TABLE 20
D-dimer of K18ACE2 mice taken at the end of the
study after B1.351. strain SARS CoV-2 infection.

| Treatment | Mouse No. | D-dimer (ng/mL) |
|---|---|---|
| Placebo | 1 | 4923.78 |
| | 2 | 3853.34 |
| | 3 | 3640 |
| | 4 | 4333.34 |
| | 5 | 3853.34 |
| | 6 | 3853.34 |
| Virus | 7 | 3920 |
| | 8 | 4373.34 |
| | 9 | 4120 |
| | 10 | 4013.34 |
| | 11 | 5872.78 |
| | 12 | 4841.26 |
| | 13 | 4066.66 |
| | 14 | 3453.34 |
| SEQ ID NO: 113 | 16 | 3493.34 |
| | 17 | 3946.66 |
| | 18 | 4706.66 |
| | 19 | 4253.34 |
| | 20 | 4666.66 |
| | 21 | 4653.34 |
| | 22 | 4613.34 |
| | 23 | 5212.6 |
| | 24 | 6615.48 |
| | 25 | 5707.74 |
| | 26 | 4386.66 |
| | 27 | 4440 |
| anti-SARS-CoV-2 | 28 | 4026.66 |
| spike protein antibody | 29 | 4160 |
| | 30 | 4573.34 |
| | 31 | 4053.34 |
| | 32 | 4400 |
| | 33 | 4706.66 |
| | 34 | 5198.86 |
| | 35 | 4480 |
| | 36 | 4413.34 |
| | 37 | 4440 |
| | 38 | 4520 |
| | 39 | 6175.36 |
| | 40 | 7014.32 |

[0513] Using a mixed model statistical analysis on the FDP data, and separately on the D-dimer data, there were no significant differences between any groups in both these measurements of serum constituents.

[0514] Conclusion

[0515] The anti-SARS-CoV-2 spike protein antibody provided some protection from weight loss and clinical signs of illness. The body weights and clinical scores of SEQ ID NO: 113 did not differ significantly from the virus infected control group.

[0516] Serum levels of D-dimer were not statistically different between placebo and viral controls or the SEQ ID NO: 113 and anti-SARS-CoV-2 spike protein antibody treatment groups when all comparisons of these groups were analyzed. However, the D-dimer graph does give the impression that SEQ ID NO: 113 and anti-SARS-CoV-2 spike protein antibody average values for animals euthanized on day 8 were closer to that of the placebo control, suggesting there may have been insufficient numbers of mice in each group to demonstrate statistical significance.

### Example 13. NRP Molecules with Modified Heparin Binding

[0517] Neuropilin has acidic polysaccharide binding sites that interact with heparin or heparin sulfate to enhance the interaction of Neuropilin and VEGF. The acidic polysaccharide binding sites are on both b1 and b2, which define a continuous electropositive region.

[0518] To decrease the binding affinity to acidic polysaccharide such as heparin and heparan sulfate, fusion proteins were designed with mutations in neuropilin fragment (e.g., K358E, K373E of b1 domain, and R513E, K514E, K516E of b2 domain).

[0519] All designed proteins were generated by codon-optimized gene synthesis and inserted into pcDNA3.4 as expression vector using Not I and Hind III restriction enzyme. The constructed expression vectors include signal peptides and for optimized transcription a Kozak sequence may be included in the 5′ untranslated region.

[0520] To obtain the amount of the constructed plasmids for transfection, the constructed plasmids were transformed into One Shot™Top10 E. coli competent cells followed by culturing overnight. The constructed plasmids were obtained by PureLink™ HiPure Expi plasmid Megaprep kit.

[0521] Fusion proteins were transiently expressed in the CHO-S system (ThermoFisher Scientific Inc.). The proteins were expressed individually as per the manufacturer's instructions. Briefly, a total of 0.8 μg of plasmid DNA at a ratio of 1:1 light to heavy chain per mL of CHO-S culture was prepared with OPTIPRO™ SFM and ExpiFectamine™. The mixture was added to CHO-S cells at a viable cell density of 6×10⁶ cells/mL and greater than 98% viability. The cell culture was incubated overnight at 37° C., 80% humidity, 8% CO₂ in a Nalgene™ Single-Use PETG Erlenmeyer Flasks shaking at 125 RPM with a 19-mm orbit. The next day the culture was enhanced (ExpiCHO™ enhancer; ThermoFisher Scientific Inc.) and fed (ExpiCHO™ feed; ThermoFisher Scientific Inc.) and transferred to 32° C., 80% humidity, 5% CO₂ shaking at 125 RPM with a 19-mm orbit. The second feed was performed on day 5 and the culture returned to 32° C. until harvest on day 12.

[0522] Harvesting was accomplished via centrifugation at 4000×g for 20 minutes. The clarified supernatant was sterilized using an asymmetrical polyethersulfone (PES) 0.22-μM filter assembly (Nalgene). The filtrate was stored at 4° C. until purification the next day.

[0523] All of the antibody sterilized supernatants were purified using MabSelect prismA™ resin (GE Healthcare Life Sciences) on an ÅKTApure (GE Healthcare Life Sciences). A 50 mM sodium phosphate, 150 mM NaCl, pH 7.0 buffer was used to equilibrate the resin. The antibody supernatant was then loaded into the column.

[0524] Next, the resin was washed with 50 mM sodium phosphate, 150 mM NaCl, pF 7.0 buffer until the chromatographic baseline returned to column equilibration levels. Elution is then performed using 100 mM sodium acetate, 20% glycerol, pH 3.0, and fractions were collected. The fractions were then immediately neutralized with 1 M Tris, pH 9.

[0525] After the fractions were obtained, ion exchange chromatography was performed. A cationic exchange chromatography (CEX) column (Capto S ImpAct), or an anion exchange chromatography (AEX) column (Capto Q Impres) were sanitized with 1 M NaOH and rinsed with MQ. Equilibration was done with 50 mM NaAc pH 5.5 (starting buffer), and 50 mM NaAc pH5.5, 1M NaCl (elution buffer) for CEX or 50 mM Tris pH 8.0 (starting buffer) and 50 mM Tris-HCl pH 8.0, 1M NaCl (elution buffer) for AEX.

[0526] The pH of starting buffer and elution buffer were sometimes Na-pi pH 7.0, Bicine pH 8.0 for CEX; and Tris 8.0, Tr 8.5 for AEX, according to pI value of proteins. The protein A purified antibody was loaded with a concentration of 1-2 g antibody/mL resin. The column was then washed with the starting buffer. The antibody product was then eluted using a gradient of 0-60% elution buffer in 25 column volumes. Each peak was collected separately and concentrated via centrifugation at 4000×g using Amicon® Ultra-15 Centrifugal Filter Units followed by buffer change into PBS.

[0527] Heparin Binding

[0528] To evaluate heparin binding, a heparin affinity column (HiTrap Heparin HP) was sanitized with 1 M NaOH and rinsed with MQ. Equilibration was done with 50 mM Na phosphate pH 7.0 (starting buffer) and 50 mM Na phosphate pH 7.0, 1M NaCl (elution buffer). The construct molecules of the present invention were loaded with a concentration of 1 mg antibody/mL resin. The column was then washed with the starting buffer. The construct molecules of the present invention were then eluted using a gradient of 100% elution buffer in 15 column volumes. A summary of the constructs is presented in tables below.

TABLE 21
Binding assay constructs. Constructs evaluated herein are presented below.

| SEQ ID | |
|---|---|
| NO. | Sequence |
| 113 | EDFKCMEALGMESGEIHSDQITASSQYSTNWSAERSRLNYPENGWTPGEDSYREWIQVDLGLLRFVTAVGTQGAISKE |
| | TKKKYYVKTYKIDVSSNGEDWITIKEGNKPVLFQGNTNPTDVVVAVFPKPLITRFVRIKPATWETGISMRFEVYGCGG |
| | GGSGGGGSEPKSCDKTHTCPPCPAPELLGGPSVFLFPPKPKDTLMISRTPEVTCVVVDVSHEDPEVKFNWYVDGVEVH |
| | NAKTKPREEQYNSTYRVVSVLAVLHQDWLNGKEYKCKVSNKALPAPIEKTISKAKGQPREPQVYTLPPSRDELTKNQV |
| | SLTCLVKGFYPSDIAVAWESNGQPENNYKTTPPVLDSDGSFFLYSKLTVDKSRWQQGNVFSCSVMHEALHAHYTQKSL |
| | SLSPGK |
| 114 | EDFKCMEALGMESGEIHSDQITASSQYSTNWSAERSRLNYPENGWTPGEDSYREWIQVDLGLLRFVTAVGTQGAISKE |
| | TKKKYYVKTYKIDVSSNGEDWITIEEGNKPVLFQGNTNPTDVVVAVFPKPLITRFVRIKPATWETGISMRFEVYGCGG |
| | GGSGGGGSGGGGSGGGGSEPKSCDKTHTCPPCPAPELLGGPSVFLFPPKPKDTLMISRTPEVTCVVVDVSHEDPEVKF |
| | NWYVDGVEVHNAKTKPREEQYNSTYRVVSVLTVLHQDWLNGKEYKCKVSNKALPAPIEKTISKAKGQPREPQVYTLPP |
| | SRDELTKNQVSLTCLVKGFYPSDIAVEWESNGQPENNYKTTPPVLDSDGSFFLYSKLTVDKSRWQQGNVFSCSVMHEA |
| | LHNHYTQKSLSLSPGK |
| 115 | EDFKCMEALGMESGEIHSDQITASSQYSTNWSAERSRLNYPENGWTPGEDSYREWIQVDLGLLRFVTAVGTQGAISKE |
| | TKKKYYVKTYKIDVSSNGEDWITIEEGNKPVLFQGNTNPTDVVVAVFPKPLITRFVRIKPATWETGISMRFEVYGCGG |
| | GGSGGGGSGGGGSGGGGSCMEALGMESGEIHSDQITASSQYSTNWSAERSRLNYPENGWTPGEDSYREWIQVDLGLLR |
| | FVTAVGTQGAISKETKKKYYVKTYKIDVSSNGEDWITIEEGNKPVLFQGNTNPTDVVVAVFPKPLITRFVRIKPATWE |
| | TGISMRFEVYGCGGGGSGGGGSGGGGSGGGGSEPKSCDKTHTCPPCPAPELLGGPSVFLFPPKPKDTLMISRTPEVTC |
| | VVVDVSHEDPEVKFNWYVDGVEVHNAKTKPREEQYNSTYRVVSVLTVLHQDWLNGKEYKCKVSNKALPAPIEKTISKA |
| | KGQPREPQVYTLPPSRDELTKNQVSLTCLVKGFYPSDIAVEWESNGQPENNYKTTPPVLDSDGSFFLYSKLTVDKSRW |
| | QQGNVFSCSVMHEALHNHYTQKSLSLSPGK |
| 116 | EDFKCMEALGMESGEIHSDQITASSQYSTNWSAERSRLNYPENGWTPGEDSYREWIQVDLGLLRFVTAVGTQGAISKE |
| | TKKKYYVKTYKIDVSSNGEDWITIEEGNKPVLFQGNTNPTDVVVAVFPKPLITRFVRIKPATWETGISMRFEVYGCGG |
| | GGSGGGGSGGGGSGGGGSCMEALGMESGEIHSDQITASSQYSTNWSAERSRLNYPENGWTPGEDSYREWIQVDLGLLR |
| | FVTAVGTQGAISKETKKKYYVKTYKIDVSSNGEDWITIEEGNKPVLFQGNTNPTDVVVAVFPKPLITRFVRIKPATWE |
| | TGISMRFEVYGCGGGGSGGGGSGGGGSGGGGSCMEALGMESGEIHSDQITASSQYSTNWSAERSRLNYPENGWTPGED |
| | SYREWIQVDLGLLRFVTAVGTQGAISKETKKKYYVKTYKIDVSSNGEDWITIEEGNKPVLFQGNTNPTDVVVAVFPKP |
| | LITREVRIKPATWETGISMRFEVYGCGGGGSGGGGSGGGGSGGGGSEPKSCDKTHTCPPCPAPELLGGPSVFLFPPKP |
| | KDTLMISRTPEVTCVVVDVSHEDPEVKFNWYVDGVEVHNAKTKPREEQYNSTYRVVSVLTVLHQDWLNGKEYKCKVSN |
| | KALPAPIEKTISKAKGQPREPQVYTLPPSRDELTKNQVSLTCLVKGFYPSDIAVEWESNGQPENNYKTTPPVLDSDGS |
| | FFLYSKLTVDKSRWQQGNVFSCSVMHEALHNHYTQKSLSLSPGK |
| 117 | EDFKCMEALGMESGEIHSDQITASSQASTNWSAERSRLNYPENGWTPGEDSYREWIQVDLGLLRFVTAVGTQGAIAKE |
| | TKKKAYVKTYKIDVSSNGEDWITIEEGNKPVLFQGNTNPTDVVVAVFPKPLITRFVRIKPATWETGISMRFEVYGCGG |
| | GGSGGGGSGGGGSGGGGSEPKSCDKTHTCPPCPAPELLGGPSVFLFPPKPKDTLMISRTPEVTCVVVDVSHEDPEVKF |
| | NWYVDGVEVHNAKTKPREEQYNSTYRVVSVLTVLHQDWLNGKEYKCKVSNKALPAPIEKTISKAKGQPREPQVYTLPP |
| | SRDELTKNQVSLTCLVKGFYPSDIAVEWESNGQPENNYKTTPPVLDSDGSFFLYSKLTVDKSRWQQGNVFSCSVMHEA |
| | LHNHYTQKSLSLSPGK |
| 118 | EDFKCMEALGMESGEIHSDQITASSQASTNWSAERSRLNYPENGWTPGEDSYREWIQVDLGLLRFVTAVGTQGAIAKE |
| | TKKKAYVKTYKIDVSSNGEDWITIEEGNKPVLFQGNTNPTDVVVAVFPKPLITRFVRIKPATWETGISMRFEVYGCGG |
| | GGSGGGGSGGGGSGGGGSCMEALGMESGEIHSDQITASSQASTNWSAERSRLNYPENGWTPGEDSYREWIQVDLGLLR |
| | FVTAVGTQGAIAKETKKKAYVKTYKIDVSSNGEDWITIEEGNKPVLFQGNTNPTDVVVAVFPKPLITRFVRIKPATWE |
| | TGISMRFEVYGCGGGGSGGGGSGGGGSGGGGSCMEALGMESGEIHSDQITASSQASTNWSAERSRLNYPENGWTPGED |
| | SYREWIQVDLGLLRFVTAVGTQGAIAKETKKKAYVKTYKIDVSSNGEDWITIEEGNKPVLFQGNTNPTDVVVAVFPKP |
| | LITREVRIKPATWETGISMRFEVYGCGGGGSGGGGSGGGGSGGGGSEPKSCDKTHTCPPCPAPELLGGPSVFLFPPKP |
| | KDTLMISRTPEVTCVVVDVSHEDPEVKFNWYVDGVEVHNAKTKPREEQYNSTYRVVSVLTVLHQDWLNGKEYKCKVSN |
| | KALPAPIEKTISKAKGQPREPQVYTLPPSRDELTKNQVSLTCLVKGFYPSDIAVEWESNGQPENNYKTTPPVLDSDGS |
| | FFLYSKLTVDKSRWQQGNVFSCSVMHEALHNHYTQKSLSLSPGK |
| 119 | EDFKCMEALGMESGEIHSDQITASSQYSTNWSAERSRLNYPENGWTPGEDSYREWIQVDLGLLRFVTAVGTQGAISKE |
| | TKKKYYVKTYEIDVSSNGEDWITIEEGNKPVLFQGNTNPTDVVVAVFPKPLITRFVRIKPATWETGISMRFEVYGCGG |
| | GGSGGGGSGGGGSGGGGSEPKSCDKTHTCPPCPAPELLGGPSVFLFPPKPKDTLMISRTPEVTCVVVDVSHEDPEVKF |
| | NWYVDGVEVHNAKTKPREEQYNSTYRVVSVLTVLHQDWLNGKEYKCKVSNKALPAPIEKTISKAKGQPREPQVYTLPP |
| | SRDELTKNQVSLTCLVKGFYPSDIAVEWESNGQPENNYKTTPPVLDSDGSFFLYSKLTVDKSRWQQGNVFSCSVMHEA |
| | LHNHYTQKSLSLSPGK |
| 120 | EDFKCMEALGMESGEIHSDQITASSQYSTNWSAERSRLNYPENGWTPGEDSYREWIQVDLGLLRFVTAVGTQGAISKE |
| | TKKKYYVKTYEIDVSSNGEDWITIEEGNKPVLFQGNTNPTDVVVAVFPKPLITRFVRIKPATWETGISMRFEVYGCGG |
| | GGSGGGGSGGGGSGGGGSCMEALGMESGEIHSDQITASSQYSTNWSAERSRLNYPENGWTPGEDSYREWIQVDLGLLR |
| | FVTAVGTQGAISKETKKKYYVKTYEIDVSSNGEDWITIEEGNKPVLFQGNTNPTDVVVAVFPKPLITRFVRIKPATWE |
| | TGISMRFEVYGCGGGGSGGGGSGGGGSGGGGSCMEALGMESGEIHSDQITASSQYSTNWSAERSRLNYPENGWTPGED |
| | SYREWIQVDLGLLRFVTAVGTQGAISKETKKKYYVKTYEIDVSSNGEDWITIEEGNKPVLFQGNTNPTDVVVAVFPKP |
| | LITRFVRIKPATWETGISMRFEVYGCGGGGSGGGGSGGGGSGGGGSEPKSCDKTHTCPPCPAPELLGGPSVFLFPPKP |
| | KDTLMISRTPEVTCVVVDVSHEDPEVKFNWYVDGVEVHNAKTKPREEQYNSTYRVVSVLTVLHQDWLNGKEYKCKVSN |
| | KALPAPIEKTISKAKGQPREPQVYTLPPSRDELTKNQVSLTCLVKGFYPSDIAVEWESNGQPENNYKTTPPVLDSDGS |
| | FFLYSKLTVDKSRWQQGNVFSCSVMHEALHNHYTQKSLSLSPGK |
| 121 | EDFKCMEALGMESGEIHSDQITASSQYSTNWSAERSRLNYPENGWTPGEDSYREWIQVDLGLLRFVTAVGTQGAISKE |
| | TKKKYYVKTYKIDVSSNGEDWITIKEGNKPVLFQGNTNPTDVVVAVFPKPLITRFVRIKPATWETGISMRFEVYGCKI |
| | TDYPCMEALGMESGEIHSDQITASSQYSTNWSAERSRLNYPENGWTPGEDSYREWIQVDLGLLRFVTAVGTQGAISKE |
| | TKKKYYVKTYKIDVSSNGEDWITIKEGNKPVLFQGNTNPTDVVVAVFPKPLITRFVRIKPATWETGISMRFEVYGCGG |
| | GGSGGGGSCMEALGMESGEIHSDQITASSQYSTNWSAERSRLNYPENGWTPGEDSYREWIQVDLGLLRFVTAVGTQGA |
| | ISKETKKKYYVKTYKIDVSSNGEDWITIKEGNKPVLFQGNTNPTDVVVAVFPKPLITRFVRIKPATWETGISMRFEVY |
| | GCKITDYPCMEALGMESGEIHSDQITASSQYSTNWSAERSRLNYPENGWTPGEDSYREWIQVDLGLLRFVTAVGTQGA |
| | ISKETKKKYYVKTYKIDVSSNGEDWITIKEGNKPVLFQGNTNPTDVVVAVFPKPLITRFVRIKPATWETGISMRFEVY |
| | GCGGGGSGGGGSEPKSCDKTHTCPPCPAPELLGGPSVFLFPPKPKDTLMISRTPEVTCVVVDVSHEDPEVKFNWYVDG |
| | VEVHNAKTKPREEQYNSTYRVVSVLAVLHQDWLNGKEYKCKVSNKALPAPIEKTISKAKGQPREPQVYTLPPSRDELT |
| | KNQVSLTCLVKGFYPSDIAVAWESNGQPENNYKTTPPVLDSDGSFFLYSKLTVDKSRWQQGNVFSCSVMHEALHAHYT |
| | QKSLSLSPGK |
| 122 | EDFKCMEALGMESGEIHSDQITASSQYSTNWSAERSRLNYPENGWTPGEDSYREWIQVDLGLLRFVTAVGTQGAISKE |
| | TKKKYYVKTYKIDVSSNGEDWITIKEGNKPVLFQGNTNPTDVVVAVFPKPLITRFVRIKPATWETGISMRFEVYGCKI |
| | TDYPCSGMLGMVSGLISDSQITSSNQGDRNWMPENIRLVTSRSGWALPPAPHSYINEWLQIDLGEEKIVRGIIIQGGK |
| | HRENKVFMRKFKIGYSNNGSDWKMIMDDSKRKAKSFEGNNNYDTPELRTFPALSTRFIRIYPERATHGGLGLRMELLG |
| | CGGGGSGGGGSEPKSCDKTHTCPPCPAPELLGGPSVFLFPPKPKDTLMISRTPEVTCVVVDVSHEDPEVKFNWYVDGV |
| | EVHNAKTKPREEQYNSTYRVVSVLTVLHQDWLNGKEYKCKVSNKALPAPIEKTISKAKGQPREPQVYTLPPSRDELTK |
| | NQVSLTCLVKGFYPSDIAVEWESNGQPENNYKTTPPVLDSDGSFFLYSKLTVDKSRWQQGNVFSCSVMHEALHNHYTQ |
| | KSLSLSPGK |
| 123 | EDFKCMEALGMESGEIHSDQITASSQYSTNWSAERSRLNYPENGWTPGADSYREWIQVDLGLLRFVTAVGTQGAISKE |
| | TKKKYYVKTYKIDVSSNGEDWITIKEGNKPVLFQGNTNPTDVVVAVFPKPLITRFVRIKPATWETGISMRFEVYGCKI |
| | TDYPCSGMLGMVSGLISDSQITSSNQGDRNWMPENIRLVTSRSGWALPPAPHSYINEWLQIDLGEEKIVRGIIIQGGK |
| | HRENKVFMRKFKIGYSNNGSDWKMIMDDSKRKAKSFEGNNNYDTPELRTFPALSTRFIRIYPERATHGGLGLRMELLG |
| | CGGGGSGGGGSERKCCVECPPCPAPPVAGPSVFLFPPKPKDQLMISRTPEVTCVVVDVSHEDPEVQFNWYVDGVEVHN |
| | AKTKPREEQFNSTFRVVSVLTVVHQDWLNGKEYKCKVSNKGLPAPIEKTISKTKGQPREPQVYTLPPSREEMTKNQVS |
| | LTCLVKGFYPSDIAVEWESNGQPENNYKTTPPMLDSDGSFFLYSKLTVDKSRWQQGNVFSCSVLHEALHNHYTQKSLS |
| | LSPGK |
| 124 | EDFKCMEALGMESGEIHSDQITASSQYSTNWSAERSRLNYPENGWTPGEDSYREWIQVDLGLLRFVTAVGTQGAISKE |
| | TKAKYYVKTYKIDVSSNGEDWITIKEGNKPVLFQGNTNPTDVVVAVFPKPLITRFVRIKPATWETGISMRFEVYGCKI |
| | TDYPCSGMLGMVSGLISDSQITSSNQGDRNWMPENIRLVTSRSGWALPPAPHSYINEWLQIDLGEEKIVRGIIIQGGK |
| | HRENKVFMRKFKIGYSNNGSDWKMIMDDSKRKAKSFEGNNNYDTPELRTFPALSTRFIRIYPERATHGGLGLRMELLG |
| | CGGGGSGGGGSERKCCVECPPCPAPPVAGPSVFLFPPKPKDQLMISRTPEVTCVVVDVSHEDPEVQFNWYVDGVEVHN |
| | AKTKPREEQFNSTFRVVSVLTVVHQDWLNGKEYKCKVSNKGLPAPIEKTISKTKGQPREPQVYTLPPSREEMTKNQVS |
| | LTCLVKGFYPSDIAVEWESNGQPENNYKTTPPMLDSDGSFFLYSKLTVDKSRWQQGNVFSCSVLHEALHNHYTQKSLS |
| | LSPGK |
| 125 | EDFKCMEALGMESGEIHSDQITASSQASTNWSAERSRLNYPENGWTPGEDSYREWIQVDLGLLRFVTAVGTQGAIAKE |
| | TKKKAYVKTYKIDVSSNGEDWITIKEGNKPVLFQGNTNPTDVVVAVFPKPLITRFVRIKPATWETGISMRFEVYGCKI |
| | TDYPCSGMLGMVSGLISDSQITSSNQGDRNWMPENIRLVTSRSGWALPPAPHSYINEWLQIDLGEEKIVRGIIIQGGK |
| | HRENKVFMRKFKIGYSNNGSDWKMIMDDSKRKAKSFEGNNNYDTPELRTFPALSTRFIRIYPERATHGGLGLRMELLG |
| | CGGGGSGGGGSERKCCVECPPCPAPPVAGPSVFLFPPKPKDQLMISRTPEVTCVVVDVSHEDPEVQFNWYVDGVEVHN |
| | AKTKPREEQFNSTFRVVSVLTVVHQDWLNGKEYKCKVSNKGLPAPIEKTISKTKGQPREPQVYTLPPSREEMTKNQVS |
| | LTCLVKGFYPSDIAVEWESNGQPENNYKTTPPMLDSDGSFFLYSKLTVDKSRWQQGNVFSCSVLHEALHNHYTQKSLS |
| | LSPGK |
| 126 | EDFKCMEALGMESGEIHSDQITASSQYSTNWSAERSRLNYPENGWTPGEDSYREWIQVDLGLLRFVTAVGTQGAISKE |
| | TKKKYYVKTYKIDVSSNGEDWITIKEGNKPVLFQGNTNPTDVVVAVFPKPLITRFVRIKPATWETGISMRFEVYGCKI |
| | TDYPCSGMLGMVSGLISDSQITSSNQGDRNWMPENIRLVTSRSGWALPPAPHSYINEWLQIDLGEEKIVRGIIIQGGK |
| | HRENKVFMEEFEIGYSNNGSDWKMIMDDSKRKAKSFEGNNNYDTPELRTFPALSTRFIRIYPERATHGGLGLRMELLG |
| | CEVEAGAPAPAGAPAPATCPPCPAPELLGGPSVFLFPPKPKDTLMISRTPEVTCVVVDVSHEDPEVKFNWYVDGVEVH |
| | NAKTKPREEQYNSTYRVVSVLTVLHQDWLNGKEYKCKVSNKALPAPIEKTISKAKGQPREPQVYTLPPSRDELTKNQV |
| | SLTCLVKGFYPSDIAVEWESNGQPENNYKTTPPVLDSDGSFFLYSKLTVDKSRWQQGNVFSCSVMHEALHNHYTQKSL |
| | SLSPGK |
| 127 | EDFKCMEALGMESGEIHSDQITASSQYSTNWSAERSRLNYPENGWTPGEDSYREWIQVDLGLLRFVTAVGTQGAISKE |
| | TKKKYYVKTYKIDVSSNGEDWITIKEGNKPVLFQGNTNPTDVVVAVFPKPLITRFVRIKPATWETGISMRFEVYGCKI |
| | TDYPCSGMLGMVSGLISDSQITSSNQGDRNWMPENIRLVTSRSGWALPPAPHSYINEWLQIDLGEEKIVRGIIIQGGK |
| | HRENKVFMAAFAIGYSNNGSDWKMIMDDSKRKAKSFEGNNNYDTPELRTFPALSTRFIRIYPERATHGGLGLRMELLG |
| | CEVEAGAPAPAGAPAPATCPPCPAPELLGGPSVFLFPPKPKDTLMISRTPEVTCVVVDVSHEDPEVKFNWYVDGVEVH |
| | NAKTKPREEQYNSTYRVVSVLTVLHQDWLNGKEYKCKVSNKALPAPIEKTISKAKGQPREPQVYTLPPSRDELTKNQV |
| | SLTCLVKGFYPSDIAVEWESNGQPENNYKTTPPVLDSDGSFFLYSKLTVDKSRWQQGNVFSCSVMHEALHNHYTQKSL |
| | SLSPGK |
| 128 | EDFKCMEALGMESGEIHSDQITASSQYSTNWSAERSRLNYPENGWTPGEDSYREWIQVDLGLLRFVTAVGTQGAISKE |
| | TKKKYYVKTYEIDVSSNGEDWITIEEGNKPVLFQGNTNPTDVVVAVFPKPLITREVRIKPATWETGISMRFEVYGCKI |
| | TDYPCSGMLGMVSGLISDSQITSSNQGDRNWMPENIRLVTSRSGWALPPAPHSYINEWLQIDLGEEKIVRGIIIQGGK |
| | HRENKVFMEEFEIGYSNNGSDWKMIMDDSKRKAKSFEGNNNYDTPELRTFPALSTRFIRIYPERATHGGLGLRMELLG |
| | CGGGGSGGGGSEPKSCDKTHTCPPCPAPELLGGPSVFLFPPKPKDTLMISRTPEVTCVVVDVSHEDPEVKFNWYVDGV |
| | EVHNAKTKPREEQYNSTYRVVSVLTVLHQDWLNGKEYKCKVSNKALPAPIEKTISKAKGQPREPQVYTLPPSRDELTK |
| | NQVSLTCLVKGFYPSDIAVEWESNGQPENNYKTTPPVLDSDGSFFLYSKLTVDKSRWQQGNVFSCSVMHEALHNHYTQ |
| | KSLSLSPGK |
| 129 | EDFKCMEALGMESGEIHSDQITASSQASTNWSAERSRLNYPENGWTPGEDSYREWIQVDLGLLRFVTAVGTQGAIAKE |
| | TKKKAYVKTYEIDVSSNGEDWITIEEGNKPVLFQGNTNPTDVVVAVFPKPLITRFVRIKPATWETGISMRFEVYGCKI |
| | TDYPCSGMLGMVSGLISDSQITSSNQGDRNWMPENIRLVTSRSGWALPPAPHSYINEWLQIDLGEEKIVRGIIIQGGK |
| | HRENKVFMEEFEIGYSNNGSDWKMIMDDSKRKAKSFEGNNNYDTPELRTFPALSTRFIRIYPERATHGGLGLRMELLG |
| | CGGGGSGGGGSEPKSCDKTHTCPPCPAPELLGGPSVFLFPPKPKDTLMISRTPEVTCVVVDVSHEDPEVKFNWYVDGV |
| | EVHNAKTKPREEQYNSTYRVVSVLTVLHQDWLNGKEYKCKVSNKALPAPIEKTISKAKGQPREPQVYTLPPSRDELTK |
| | NQVSLTCLVKGFYPSDIAVEWESNGQPENNYKTTPPVLDSDGSFFLYSKLTVDKSRWQQGNVFSCSVMHEALHNHYTQ |
| | KSLSLSPGK |
| 130 | TCPPCPAPEFLGGPSVFLFPPKPKDTLMISRTPEVTCVVVDVSQEDPEVQFNWYVDGVEVHNAKTKPREEQFNSTYRV |
| | VSVLTVLHQDWLNGKEYKCKVSNKGLPSSIEKTISKAKGQPREPQVYTLPPSQEEMTENQVSLTCLVKGFYPSDIAVE |
| | WESNGQPENNYKTTPPVLDSDGSFFLYSWLTVDKSRWQEGNVFSCSVMHEALHNHYTQKSLSLSLGKGAPAPAGAPAP |
| | AEDFKCMEALGMESGEIHSDQITASSQYSTNWSAERSRLNYPENGWTPGEDSYREWIQVDLGLLRFVTAVGTQGAISK |
| | ETKKKYYVKTYKIDVSSNGEDWITIKEGNKPVLFQGNTNPTDVVVAVFPKPLITRFVRIKPATWETGISMRFEVYGCK |
| | ITDYPCSGMLGMVSGLISDSQITSSNQGDRNWMPENIRLVTSRSGWALPPAPHSYINEWLQIDLGEEKIVRGIIIQGG |
| | KHRENKVFMRKFKIGYSNNGSDWKMIMDDSKRKAKSFEGNNNYDTPELRTFPALSTRFIRIYPERATHGGLGLRMELL |
| | GCEVEA |
| 131 | TCPPCPAPEFLGGPSVFLFPPKPKDTLMISRTPEVTCVVVDVSQEDPEVQFNWYVDGVEVHNAKTKPREEQFNSTYRV |
| | VSVLTVLHQDWLNGKEYKCKVSNKGLPSSIEKTISKAKGQPREPQVYTLPPSQEEMTENQVSLTCLVKGFYPSDIAVE |
| | WESNGQPENNYKTTPPVLDSDGSFFLYSWLTVDKSRWQEGNVFSCSVMHEALHNHYTQKSLSLSLGKGAPAPAGAPAP |
| | AEDFKCMEALGMESGEIHSDQITASSQASTNWSAERSRLNYPENGWAPGEASYREWIQVDLGLLRFVTAVGTQGAISK |
| | ETKKKYYVKTYKIDVSSNGEDWITIKEGNKPVLFQGNTNPTDVVVAVFPKPLITRFVRIKPATWETGISMRFEVYGCK |
| | ITDYPCSGMLGMVSGLISDSQITSSNQGDRNWMPENIRLVTSRSGWALPPAPHSYINEWLQIDLGEEKIVRGIIIQGG |
| | KHRENKVFMAAFAIGYSNNGSDWKMIMDDSKRKAKSFEGNNNYDTPELRTFPALSTRFIRIYPERATHGGLGLRMELL |
| | GCEVEA |
| 132 | TCPPCPAPEFLGGPSVFLFPPKPKDTLMISRTPEVTCVVVDVSQEDPEVQFNWYVDGVEVHNAKTKPREEQFNSTYRV |
| | VSVLTVLHQDWLNGKEYKCKVSNKGLPSSIEKTISKAKGQPREPQVYTLPPSQEEMTENQVSLTCLVKGFYPSDIAVE |
| | WESNGQPENNYKTTPPVLDSDGSFFLYSWLTVDKSRWQEGNVFSCSVMHEALHNHYTQKSLSLSLGKGAPAPAGAPAP |
| | AEDFKCSGMLGMVSGLISDSQITSSNQGDRNWMPENIRLVTSRSGWALPPAPHSYINEWLQIDLGEEKIVRGIIIQGG |
| | KHRENKVFMAAFAIGYSNNGSDWKMIMDDSKRKAKSFEGNNNYDTPELRTFPALSTRFIRIYPERATHGGLGLRMELL |
| | GCKITDYPCMEALGMESGEIHSDQITASSQASTNWSAERSRLNYPENGWAPGEASYREWIQVDLGLLRFVTAVGTQGA |
| | ISKETKKKYYVKTYKIDVSSNGEDWITIKEGNKPVLFQGNTNPTDVVVAVFPKPLITRFVRIKPATWETGISMRFEVY |
| | GCEVEA |
| 133 | EDFKCMEALGMESGEIHSDQITASSQYSTNWSAERSRLNYPENGWTPGEDSYREWIQVDLGLLRFVTAVGTQGAISKE |
| | TKKKYYVKTYKIDVSSNGEDWITIEEGNKPVLFQGNTNPTDVVVAVFPKPLITRFVRIKPATWETGISMRFEVYGCGG |
| | GGSGGGGSGGGGSGGGGSEPKSCDKTHTCPPCPAPELLGGPSVFLFPPKPKDTLMISRTPEVTCVVVDVSHEDPEVKF |
| | NWYVDGVEVHNAKTKPREEQYNSTYRVVSVLTVLHQDWLNGKEYKCKVSNKALPAPIEKTISKAKGQPREPQVYTLPP |
| | SRDELTKNQVSLTCLVKGFYPSDIAVEWESNGQPENNYKTTPPVLDSDGSFFLYSKLTVDKSRWQQGNVFSCSVMHEA |
| | LHNHYTQKSLSLSPGKGGGGSGGGGSGGGGSGGGGSCMEALGMESGEIHSDQITASSQYSTNWSAERSRLNYPENGWT |
| | PGEDSYREWIQVDLGLLRFVTAVGTQGAISKETKKKYYVKTYKIDVSSNGEDWITIEEGNKPVLFQGNTNPTDVVVAV |
| | FPKPLITREVRIKPATWETGISMRFEVYGCEVEA |
| 134 | EDFKCMEALGMESGEIHSDQITASSQYSTNWSAERSRLNYPENGWTPGEDSYREWIQVDLGLLRFVTAVGTQGAISKE |
| | TKKKYYVKTYKIDVSSNGEDWITIEEGNKPVLFQGNTNPTDVVVAVFPKPLITRFVRIKPATWETGISMRFEVYGCGG |
| | GGSGGGGSGGGGSGGGGSCMEALGMESGEIHSDQITASSQYSTNWSAERSRLNYPENGWTPGEDSYREWIQVDLGLLR |
| | FVTAVGTQGAISKETKKKYYVKTYKIDVSSNGEDWITIEEGNKPVLFQGNTNPTDVVVAVFPKPLITRFVRIKPATWE |
| | TGISMRFEVYGCGGGGSGGGGSGGGGSGGGGSEPKSCDKTHTCPPCPAPELLGGPSVFLFPPKPKDTLMISRTPEVTC |
| | VVVDVSHEDPEVKFNWYVDGVEVHNAKTKPREEQYNSTYRVVSVLTVLHQDWLNGKEYKCKVSNKALPAPIEKTISKA |
| | KGQPREPQVYTLPPSRDELTKNQVSLTCLVKGFYPSDIAVEWESNGQPENNYKTTPPVLDSDGSFFLYSKLTVDKSRW |
| | QQGNVFSCSVMHEALHNHYTQKSLSLSPGKGGGGSGGGGSGGGGSGGGGSCMEALGMESGEIHSDQITASSQYSTNWS |
| | AERSRLNYPENGWTPGEDSYREWIQVDLGLLRFVTAVGTQGAISKETKKKYYVKTYKIDVSSNGEDWITIEEGNKPVL |
| | FQGNTNPTDVVVAVFPKPLITRFVRIKPATWETGISMRFEVYGCEVEA |
| 135 | EDFKCMEALGMESGEIHSDQITASSQYSTNWSAERSRLNYPENGWTPGEDSYREWIQVDLGLLRFVTAVGTQGAISKE |
| | TKKKYYVKTYKIDVSSNGEDWITIKEGNKPVLFQGNTNPTDVVVAVFPKPLITRFVRIKPATWETGISMRFEVYGCGG |
| | GGSGGGGSGGGGSGGGGSCMEALGMESGEIHSDQITASSQYSTNWSAERSRLNYPENGWTPGEDSYREWIQVDLGLLR |
| | FVTAVGTQGAISKETKKKYYVKTYKIDVSSNGEDWITIKEGNKPVLFQGNTNPTDVVVAVFPKPLITRFVRIKPATWE |
| | TGISMRFEVYGCGGGGSGGGGSGGGGSGGGGSEPKSCDKTHTCPPCPAPELLGGPSVFLFPPKPKDTLMISRTPEVTC |
| | VVVDVSHEDPEVKFNWYVDGVEVHNAKTKPREEQYNSTYRVVSVLTVLHQDWLNGKEYKCKVSNKALPAPIEKTISKA |
| | KGQPREPQVYTLPPSRDELTKNQVSLTCLVKGFYPSDIAVEWESNGQPENNYKTTPPVLDSDGSFFLYSKLTVDKSRW |
| | QQGNVFSCSVMHEALHNHYTQKSLSLSPGK |
| 136 | EDFKCMEALGMESGEIHSDQITASSQYSTNWSAERSRLNYPENGWTPGEDSYREWIQVDLGLLRFVTAVGTQGAISKE |
| | TKKKYYVKTYKIDVSSNGEDWITIKEGNKPVLFQGNTNPTDVVVAVFPKPLITRFVRIKPATWETGISMRFEVYGCGG |
| | GGSGGGGSGGGGSGGGGSCMEALGMESGEIHSDQITASSQYSTNWSAERSRLNYPENGWTPGEDSYREWIQVDLGLLR |
| | FVTAVGTQGAISKETKKKYYVKTYKIDVSSNGEDWITIKEGNKPVLFQGNTNPTDVVVAVFPKPLITRFVRIKPATWE |
| | TGISMRFEVYGCGGGGSGGGGSGGGGSGGGGSCMEALGMESGEIHSDQITASSQYSTNWSAERSRLNYPENGWTPGED |
| | SYREWIQVDLGLLRFVTAVGTQGAISKETKKKYYVKTYKIDVSSNGEDWITIKEGNKPVLFQGNTNPTDVVVAVFPKP |
| | LITRFVRIKPATWETGISMRFEVYGCGGGGSGGGGSGGGGSGGGGSEPKSCDKTHTCPPCPAPELLGGPSVFLFPPKP |
| | KDTLMISRTPEVTCVVVDVSHEDPEVKFNWYVDGVEVHNAKTKPREEQYNSTYRVVSVLTVLHQDWLNGKEYKCKVSN |
| | KALPAPIEKTISKAKGQPREPQVYTLPPSRDELTKNQVSLTCLVKGFYPSDIAVEWESNGQPENNYKTTPPVLDSDGS |
| | FFLYSKLTVDKSRWQQGNVFSCSVMHEALHNHYTQKSLSLSPGK |
| 137 | EDFKCMEALGMESGEIHSDQITASSQYSTNWSAERSRLNYPENGWTPGEDSYREWIQVDLGLLRFVTAVGTQGAISKE |
| | TKKKYYVKTYKIDVSSNGEDWITIKEGNKPVLFQGNTNPTDVVVAVFPKPLITRFVRIKPATWETGISMRFEVYGCGG |
| | GGSGGGGSGGGGSGGGGSEPKSCDKTHTCPPCPAPELLGGPSVFLFPPKPKDTLMISRTPEVTCVVVDVSHEDPEVKF |
| | NWYVDGVEVHNAKTKPREEQYNSTYRVVSVLTVLHQDWLNGKEYKCKVSNKALPAPIEKTISKAKGQPREPQVYTLPP |
| | SRDELTKNQVSLTCLVKGFYPSDIAVEWESNGQPENNYKTTPPVLDSDGSFFLYSKLTVDKSRWQQGNVFSCSVMHEA |
| | LHNHYTQKSLSLSPGKGGGGSGGGGSGGGGSGGGGSCMEALGMESGEIHSDQITASSQYSTNWSAERSRLNYPENGWT |
| | PGEDSYREWIQVDLGLLRFVTAVGTQGAISKETKKKYYVKTYKIDVSSNGEDWITIKEGNKPVLFQGNTNPTDVVVAV |
| | FPKPLITRFVRIKPATWETGISMRFEVYGCEVEA |
| 138 | EDFKCMEALGMESGEIHSDQITASSQYSTNWSAERSRLNYPENGWTPGEDSYREWIQVDLGLLRFVTAVGTQGAISKE |
| | TKKKYYVKTYKIDVSSNGEDWITIKEGNKPVLFQGNTNPTDVVVAVFPKPLITRFVRIKPATWETGISMRFEVYGCKI |
| | TDYPCSGMLGMVSGLISDSQITSSNQGDRNWMPENIRLVTSRSGWALPPAPHSYINEWLQIDLGEEKIVRGIIIQGGK |
| | HRENKVFMRKFKIGYSNNGSDWKMIMDDSKRKAKSFEGNNNYDTPELRTFPALSTRFIRIYPERATHGGLGLRMELLG |
| | CGGGGSGGGGSCMEALGMESGEIHSDQITASSQYSTNWSAERSRLNYPENGWTPGEDSYREWIQVDLGLLRFVTAVGT |
| | QGAISKETKKKYYVKTYKIDVSSNGEDWITIKEGNKPVLFQGNTNPTDVVVAVFPKPLITRFVRIKPATWETGISMRF |
| | EVYGCKITDYPCSGMLGMVSGLISDSQITSSNQGDRNWMPENIRLVTSRSGWALPPAPHSYINEWLQIDLGEEKIVRG |
| | IIIQGGKHRENKVFMRKFKIGYSNNGSDWKMIMDDSKRKAKSFEGNNNYDTPELRTFPALSTRFIRIYPERATHGGLG |
| | LRMELLGCGGGGSGGGGSEPKSCDKTHTCPPCPAPELLGGPSVFLFPPKPKDTLMISRTPEVTCVVVDVSHEDPEVKF |
| | NWYVDGVEVHNAKTKPREEQYNSTYRVVSVLAVLHQDWLNGKEYKCKVSNKALPAPIEKTISKAKGQPREPQVYTLPP |
| | SRDELTKNQVSLTCLVKGFYPSDIAVAWESNGQPENNYKTTPPVLDSDGSFFLYSKLTVDKSRWQQGNVFSCSVMHEA |
| | LHAHYTQKSLSLSPGK |
| 139 | EDFKCMEALGMESGEIHSDQITASSQYSTNWSAERSRLNYPENGWTPGADSYREWIQVDLGLLRFVTAVGTQGAISKE |
| | TKKKYYVKTYKIDVSSNGEDWITIKEGNKPVLFQGNTNPTDVVVAVFPKPLITRFVRIKPATWETGISMRFEVYGCKI |
| | TDYPCSGMLGMVSGLISDSQITSSNQGDRNWMPENIRLVTSRSGWALPPAPHSYINEWLQIDLGEEKIVRGIIIQGGK |
| | HRENKVFMRKFKIGYSNNGSDWKMIMDDSKRKAKSFEGNNNYDTPELRTFPALSTRFIRIYPERATHGGLGLRMELLG |
| | CGGGGSGGGGSCMEALGMESGEIHSDQITASSQYSTNWSAERSRLNYPENGWTPGADSYREWIQVDLGLLRFVTAVGT |
| | QGAISKETKKKYYVKTYKIDVSSNGEDWITIKEGNKPVLFQGNTNPTDVVVAVFPKPLITRFVRIKPATWETGISMRF |
| | EVYGCKITDYPCSGMLGMVSGLISDSQITSSNQGDRNWMPENIRLVTSRSGWALPPAPHSYINEWLQIDLGEEKIVRG |
| | IIIQGGKHRENKVFMRKFKIGYSNNGSDWKMIMDDSKRKAKSFEGNNNYDTPELRTFPALSTRFIRIYPERATHGGLG |
| | LRMELLGCGGGGSGGGGSEPKSCDKTHTCPPCPAPELLGGPSVFLFPPKPKDTLMISRTPEVTCVVVDVSHEDPEVKF |
| | NWYVDGVEVHNAKTKPREEQYNSTYRVVSVLTVLHQDWLNGKEYKCKVSNKALPAPIEKTISKAKGQPREPQVYTLPP |
| | SRDELTKNQVSLTCLVKGFYPSDIAVEWESNGQPENNYKTTPPVLDSDGSFFLYSKLTVDKSRWQQGNVFSCSVMHEA |
| | LHNHYTQKSLSLSPGK |
| 140 | EDFKCMEALGMESGEIHSDQITASSQYSTNWSAERSRLNYPENGWTPGEDSYREWIQVDLGLLRFVTAVGTQGAISKE |
| | TKAKYYVKTYKIDVSSNGEDWITIKEGNKPVLFQGNTNPTDVVVAVFPKPLITRFVRIKPATWETGISMRFEVYGCKI |
| | TDYPCSGMLGMVSGLISDSQITSSNQGDRNWMPENIRLVTSRSGWALPPAPHSYINEWLQIDLGEEKIVRGIIIQGGK |
| | HRENKVFMRKFKIGYSNNGSDWKMIMDDSKRKAKSFEGNNNYDTPELRTFPALSTRFIRIYPERATHGGLGLRMELLG |
| | CGGGGSGGGGSCMEALGMESGEIHSDQITASSQYSTNWSAERSRLNYPENGWTPGEDSYREWIQVDLGLLRFVTAVGT |
| | QGAISKETKAKYYVKTYKIDVSSNGEDWITIKEGNKPVLFQGNTNPTDVVVAVFPKPLITRFVRIKPATWETGISMRF |
| | EVYGCKITDYPCSGMLGMVSGLISDSQITSSNQGDRNWMPENIRLVTSRSGWALPPAPHSYINEWLQIDLGEEKIVRG |
| | IIIQGGKHRENKVFMRKFKIGYSNNGSDWKMIMDDSKRKAKSFEGNNNYDTPELRTFPALSTRFIRIYPERATHGGLG |
| | LRMELLGCGGGGSGGGGSEPKSCDKTHTCPPCPAPELLGGPSVFLFPPKPKDTLMISRTPEVTCVVVDVSHEDPEVKF |
| | NWYVDGVEVHNAKTKPREEQYASTYRVVSVLAVLHQDWLNGKEYKCKVSNKALPAPIEKTISKAKGQPREPQVYTLPP |
| | SRDELTKNQVSLTCLVKGFYPSDIAVAWESNGQPENNYKTTPPVLDSDGSFFLYSKLTVDKSRWQQGNVFSCSVMHEA |
| | LHAHYTQKSLSLSPGK |
| 141 | EDFKCMEALGMESGEIHSDQITASSQASTNWSAERSRLNYPENGWTPGEDSYREWIQVDLGLLRFVTAVGTQGAIAKE |
| | TKKKAYVKTYKIDVSSNGEDWITIKEGNKPVLFQGNTNPTDVVVAVFPKPLITRFVRIKPATWETGISMRFEVYGCKI |
| | TDYPCSGMLGMVSGLISDSQITSSNQGDRNWMPENIRLVTSRSGWALPPAPHSYINEWLQIDLGEEKIVRGIIIQGGK |
| | HRENKVFMRKFKIGYSNNGSDWKMIMDDSKRKAKSFEGNNNYDTPELRTFPALSTRFIRIYPERATHGGLGLRMELLG |
| | CGGGGSGGGGSCMEALGMESGEIHSDQITASSQASTNWSAERSRLNYPENGWTPGEDSYREWIQVDLGLLRFVTAVGT |
| | QGAIAKETKKKAYVKTYKIDVSSNGEDWITIKEGNKPVLFQGNTNPTDVVVAVFPKPLITRFVRIKPATWETGISMRF |
| | EVYGCKITDYPCSGMLGMVSGLISDSQITSSNQGDRNWMPENIRLVTSRSGWALPPAPHSYINEWLQIDLGEEKIVRG |
| | IIIQGGKHRENKVFMRKFKIGYSNNGSDWKMIMDDSKRKAKSFEGNNNYDTPELRTFPALSTRFIRIYPERATHGGLG |
| | LRMELLGCGGGGSGGGGSEPKSCDKTHTCPPCPAPELLGGPSVFLFPPKPKDTLMISRTPEVTCVVVDVSHEDPEVKF |
| | NWYVDGVEVHNAKTKPREEQYNSTYRVVSVLTVLHQDWLNGKEYKCKVSNKALPAPIEKTISKAKGQPREPQVYTLPP |
| | SRDELTKNQVSLTCLVKGFYPSDIAVEWESNGQPENNYKTTPPVLDSDGSFFLYSKLTVDKSRWQQGNVFSCSVMHEA |
| | LHNHYTQKSLSLSPGK |
| 142 | EDFKCMEALGMESGEIHSDQITASSQYSTNWSAERSRLNYPENGWTPGEDSYREWIQVDLGLLRFVTAVGTQGAISKE |
| | TKKKYYVKTYKIDVSSNGEDWITIKEGNKPVLFQGNTNPTDVVVAVFPKPLITRFVRIKPATWETGISMRFEVYGCKI |
| | TDYPCSGMLGMVSGLISDSQITSSNQGDRNWMPENIRLVTSRSGWALPPAPHSYINEWLQIDLGEEKIVRGIIIQGGK |
| | HRENKVFMRKFKIGYSNNGSDWKMIMDDSKRKAKSFEGNNNYDTPELRTFPALSTRFIRIYPERATHGGLGLRMELLG |
| | CGGGGSGGGGSEPKSCDKTHTCPPCPAPELLGGPSVFLFPPKPKDTLMISRTPEVTCVVVDVSHEDPEVKFNWYVDGV |
| | EVHNAKTKPREEQYNSTYRVVSVLTVLHQDWLNGKEYKCKVSNKALPAPIEKTISKAKGQPREPQVYTLPPSRDELTK |
| | NQVSLTCLVKGFYPSDIAVEWESNGQPENNYKTTPPVLDSDGSFFLYSKLTVDKSRWQQGNVFSCSVMHEALHNHYTQ |
| | KSLSLSPGKGGGGSGGGGSCMEALGMESGEIHSDQITASSQYSTNWSAERSRLNYPENGWTPGEDSYREWIQVDLGLL |
| | RFVTAVGTQGAISKETKKKYYVKTYKIDVSSNGEDWITIKEGNKPVLFQGNTNPTDVVVAVFPKPLITRFVRIKPATW |
| | ETGISMRFEVYGCKITDYPCSGMLGMVSGLISDSQITSSNQGDRNWMPENIRLVTSRSGWALPPAPHSYINEWLQIDL |
| | GEEKIVRGIIIQGGKHRENKVFMRKFKIGYSNNGSDWKMIMDDSKRKAKSFEGNNNYDTPELRTFPALSTRFIRIYPE |
| | RATHGGLGLRMELLGCEVEA |
| 143 | EDFKCMEALGMESGEIHSDQITASSQYSTNWSAERSRLNYPENGWTPGADSYREWIQVDLGLLRFVTAVGTQGAISKE |
| | TKKKYYVKTYKIDVSSNGEDWITIKEGNKPVLFQGNTNPTDVVVAVFPKPLITRFVRIKPATWETGISMRFEVYGCKI |
| | TDYPCSGMLGMVSGLISDSQITSSNQGDRNWMPENIRLVTSRSGWALPPAPHSYINEWLQIDLGEEKIVRGIIIQGGK |
| | HRENKVFMRKFKIGYSNNGSDWKMIMDDSKRKAKSFEGNNNYDTPELRTFPALSTRFIRIYPERATHGGLGLRMELLG |
| | CGGGGSGGGGSEPKSCDKTHTCPPCPAPELLGGPSVFLFPPKPKDTLMISRTPEVTCVVVDVSHEDPEVKFNWYVDGV |
| | EVHNAKTKPREEQYNSTYRVVSVLAVLHQDWLNGKEYKCKVSNKALPAPIEKTISKAKGQPREPQVYTLPPSRDELTK |
| | NQVSLTCLVKGFYPSDIAVAWESNGQPENNYKTTPPVLDSDGSFFLYSKLTVDKSRWQQGNVFSCSVMHEALHAHYTQ |
| | KSLSLSPGKGGGGSGGGGSCMEALGMESGEIHSDQITASSQYSTNWSAERSRLNYPENGWTPGADSYREWIQVDLGLL |
| | RFVTAVGTQGAISKETKKKYYVKTYKIDVSSNGEDWITIKEGNKPVLFQGNTNPTDVVVAVFPKPLITRFVRIKPATW |
| | ETGISMRFEVYGCKITDYPCSGMLGMVSGLISDSQITSSNQGDRNWMPENIRLVTSRSGWALPPAPHSYINEWLQIDL |
| | GEEKIVRGIIIQGGKHRENKVFMRKFKIGYSNNGSDWKMIMDDSKRKAKSFEGNNNYDTPELRTFPALSTRFIRIYPE |
| | RATHGGLGLRMELLGCEVEA |
| 144 | ENFQCNVPLGMESGRIANEQISASSTYSDGRWTPQQSRLHGDDNGWTPNLDSNKEYLQVDLRFLTMLTAIATQGAISR |
| | ETQNGYYVKSYKLEVSTNGEDWMVYRHGKNHKVFQANNDATEVVLNKLHAPLLTRFVRIRPQTWHSGIALRLELFGCG |
| | GGGSGGGGSGGGGSGGGGSEPKSCDKTHTCPPCPAPELLGGPSVFLFPPKPKDTLMISRTPEVTCVVVDVSHEDPEVK |
| | FNWYVDGVEVHNAKTKPREEQYNSTYRVVSVLTVLHQDWLNGKEYKCKVSNKALPAPIEKTISKAKGQPREPQVYTLP |
| | PSRDELTKNQVSLTCLVKGFYPSDIAVEWESNGQPENNYKTTPPVLDSDGSFFLYSKLTVDKSRWQQGNVFSCSVMHE |
| | ALHNHYTQKSLSLSPGK |
| 145 | ENFQCNVPLGMESGRIANEQISASSTYSDGRWTPQQSRLHGDDNGWTPNLDSNKEYLQVDLRFLTMLTAIATQGAISR |
| | ETQNGYYVKSYKLEVSTNGEDWMVYRHGKNHKVFQANNDATEVVLNKLHAPLLTRFVRIRPQTWHSGIALRLELFGCG |
| | GGGSGGGGSGGGGSGGGGSCNVPLGMESGRIANEQISASSTYSDGRWTPQQSRLHGDDNGWTPNLDSNKEYLQVDLRF |
| | LTMLTAIATQGAISRETQNGYYVKSYKLEVSTNGEDWMVYRHGKNHKVFQANNDATEVVLNKLHAPLLTRFVRIRPQT |
| | WHSGIALRLELFGCGGGGSGGGGSGGGGSGGGGSEPKSCDKTHTCPPCPAPELLGGPSVFLFPPKPKDTLMISRTPEV |
| | TCVVVDVSHEDPEVKFNWYVDGVEVHNAKTKPREEQYNSTYRVVSVLTVLHQDWLNGKEYKCKVSNKALPAPIEKTIS |
| | KAKGQPREPQVYTLPPSRDELTKNQVSLTCLVKGFYPSDIAVEWESNGQPENNYKTTPPVLDSDGSFFLYSKLTVDKS |
| | RWQQGNVFSCSVMHEALHNHYTQKSLSLSPGK |
| 146 | ENFQCNVPLGMESGRIANEQISASSTYSDGRWTPQQSRLHGDDNGWTPNLDSNKEYLQVDLRFLTMLTAIATQGAISR |
| | ETQNGYYVKSYKLEVSTNGEDWMVYRHGKNHKVFQANNDATEVVLNKLHAPLLTRFVRIRPQTWHSGIALRLELFGCG |
| | GGGSGGGGSGGGGSGGGGSCNVPLGMESGRIANEQISASSTYSDGRWTPQQSRLHGDDNGWTPNLDSNKEYLQVDLRF |
| | LTMLTAIATQGAISRETQNGYYVKSYKLEVSTNGEDWMVYRHGKNHKVFQANNDATEVVLNKLHAPLLTRFVRIRPQT |
| | WHSGIALRLELFGCGGGGSGGGGSGGGGSGGGGSCNVPLGMESGRIANEQISASSTYSDGRWTPQQSRLHGDDNGWTP |
| | NLDSNKEYLQVDLRFLTMLTAIATQGAISRETQNGYYVKSYKLEVSTNGEDWMVYRHGKNHKVFQANNDATEVVLNKL |
| | HAPLLTREVRIRPQTWHSGIALRLELFGCGGGGSGGGGSGGGGSGGGGSEPKSCDKTHTCPPCPAPELLGGPSVFLFP |
| | PKPKDTLMISRTPEVTCVVVDVSHEDPEVKFNWYVDGVEVHNAKTKPREEQYNSTYRVVSVLTVLHQDWLNGKEYKCK |
| | VSNKALPAPIEKTISKAKGQPREPQVYTLPPSRDELTKNQVSLTCLVKGFYPSDIAVEWESNGQPENNYKTTPPVLDS |
| | DGSFFLYSKLTVDKSRWQQGNVFSCSVMHEALHNHYTQKSLSLSPGK |
| 147 | ENFQCNVPLGMESGRIANEQISASSTYSDGRWTPQQSRLHGDDNGWTPNLDSNKEYLQVDLRFLTMLTAIATQGAISR |
| | ETQNGYYVKSYKLEVSTNGEDWMVYEHGKNHKVFQANNDATEVVLNKLHAPLLTRFVRIRPQTWHSGIALRLELFGCG |
| | GGGSGGGGSGGGGSGGGGSEPKSCDKTHTCPPCPAPELLGGPSVFLFPPKPKDTLMISRTPEVTCVVVDVSHEDPEVK |
| | FNWYVDGVEVHNAKTKPREEQYNSTYRVVSVLTVLHQDWLNGKEYKCKVSNKALPAPIEKTISKAKGQPREPQVYTLP |
| | PSRDELTKNQVSLTCLVKGFYPSDIAVEWESNGQPENNYKTTPPVLDSDGSFFLYSKLTVDKSRWQQGNVFSCSVMHE |
| | ALHNHYTQKSLSLSPGK |
| 148 | ENFQCNVPLGMESGRIANEQISASSTYSDGRWTPQQSRLHGDDNGWTPNLDSNKEYLQVDLRFLTMLTAIATQGAISR |
| | ETQNGYYVKSYKLEVSTNGEDWMVYEHGKNHKVFQANNDATEVVLNKLHAPLLTRFVRIRPQTWHSGIALRLELFGCG |
| | GGGSGGGGSGGGGSGGGGSCNVPLGMESGRIANEQISASSTYSDGRWTPQQSRLHGDDNGWTPNLDSNKEYLQVDLRF |
| | LTMLTAIATQGAISRETQNGYYVKSYKLEVSTNGEDWMVYEHGKNHKVFQANNDATEVVLNKLHAPLLTREVRIRPQT |
| | WHSGIALRLELFGCGGGGSGGGGSGGGGSGGGGSEPKSCDKTHTCPPCPAPELLGGPSVFLFPPKPKDTLMISRTPEV |
| | TCVVVDVSHEDPEVKFNWYVDGVEVHNAKTKPREEQYNSTYRVVSVLTVLHQDWLNGKEYKCKVSNKALPAPIEKTIS |
| | KAKGQPREPQVYTLPPSRDELTKNQVSLTCLVKGFYPSDIAVEWESNGQPENNYKTTPPVLDSDGSFFLYSKLTVDKS |
| | RWQQGNVFSCSVMHEALHNHYTQKSLSLSPGK |
| 149 | ENFQCNVPLGMESGRIANEQISASSTYSDGRWTPQQSRLHGDDNGWTPNLDSNKEYLQVDLRFLTMLTAIATQGAISR |
| | ETQNGYYVKSYKLEVSTNGEDWMVYEHGKNHKVFQANNDATEVVLNKLHAPLLTRFVRIRPQTWHSGIALRLELFGCG |
| | GGGSGGGGSGGGGSGGGGSCNVPLGMESGRIANEQISASSTYSDGRWTPQQSRLHGDDNGWTPNLDSNKEYLQVDLRF |
| | LTMLTAIATQGAISRETQNGYYVKSYKLEVSTNGEDWMVYEHGKNHKVFQANNDATEVVLNKLHAPLLTRFVRIRPQT |
| | WHSGIALRLELFGCGGGGSGGGGSGGGGSGGGGSCNVPLGMESGRIANEQISASSTYSDGRWTPQQSRLHGDDNGWTP |
| | NLDSNKEYLQVDLRFLTMLTAIATQGAISRETQNGYYVKSYKLEVSTNGEDWMVYEHGKNHKVFQANNDATEVVLNKL |
| | HAPLLTREVRIRPQTWHSGIALRLELFGCGGGGSGGGGSGGGGSGGGGSEPKSCDKTHTCPPCPAPELLGGPSVFLFP |
| | PKPKDTLMISRTPEVTCVVVDVSHEDPEVKFNWYVDGVEVHNAKTKPREEQYNSTYRVVSVLTVLHQDWLNGKEYKCK |
| | VSNKALPAPIEKTISKAKGQPREPQVYTLPPSRDELTKNQVSLTCLVKGFYPSDIAVEWESNGQPENNYKTTPPVLDS |
| | DGSFFLYSKLTVDKSRWQQGNVFSCSVMHEALHNHYTQKSLSLSPGK |
| 150 | ENFQCNVPLGMESGRIANEQISASSTASDGRWTPQQSRLHGDDNGWTPNLDSNKEYLQVDLRFLTMLTAIATQGAIAR |
| | ETQNGAYVKSYKLEVSTNGEDWMVYEHGKNHKVFQANNDATEVVLNKLHAPLLTRFVRIRPQTWHSGIALRLELFGCG |
| | GGGSGGGGSGGGGSGGGGSEPKSCDKTHTCPPCPAPELLGGPSVFLFPPKPKDTLMISRTPEVTCVVVDVSHEDPEVK |
| | FNWYVDGVEVHNAKTKPREEQYNSTYRVVSVLTVLHQDWLNGKEYKCKVSNKALPAPIEKTISKAKGQPREPQVYTLP |
| | PSRDELTKNQVSLTCLVKGFYPSDIAVEWESNGQPENNYKTTPPVLDSDGSFFLYSKLTVDKSRWQQGNVFSCSVMHE |
| | ALHNHYTQKSLSLSPGK |
| 151 | ENFQCNVPLGMESGRIANEQISASSTASDGRWTPQQSRLHGDDNGWTPNLDSNKEYLQVDLRFLTMLTAIATQGAIAR |
| | ETQNGAYVKSYKLEVSTNGEDWMVYEHGKNHKVFQANNDATEVVLNKLHAPLLTRFVRIRPQTWHSGIALRLELFGCG |
| | GGGSGGGGSGGGGSGGGGSCNVPLGMESGRIANEQISASSTASDGRWTPQQSRLHGDDNGWTPNLDSNKEYLQVDLRF |
| | LTMLTAIATQGAIARETQNGAYVKSYKLEVSTNGEDWMVYEHGKNHKVFQANNDATEVVLNKLHAPLLTRFVRIRPQT |
| | WHSGIALRLELFGCGGGGSGGGGSGGGGSGGGGSCNVPLGMESGRIANEQISASSTASDGRWTPQQSRLHGDDNGWTP |
| | NLDSNKEYLQVDLRFLTMLTAIATQGAIARETQNGAYVKSYKLEVSTNGEDWMVYEHGKNHKVFQANNDATEVVLNKL |
| | HAPLLTREVRIRPQTWHSGIALRLELFGCGGGGSGGGGSGGGGSGGGGSEPKSCDKTHTCPPCPAPELLGGPSVFLFP |
| | PKPKDTLMISRTPEVTCVVVDVSHEDPEVKFNWYVDGVEVHNAKTKPREEQYNSTYRVVSVLTVLHQDWLNGKEYKCK |
| | VSNKALPAPIEKTISKAKGQPREPQVYTLPPSRDELTKNQVSLTCLVKGFYPSDIAVEWESNGQPENNYKTTPPVLDS |
| | DGSFFLYSKLTVDKSRWQQGNVFSCSVMHEALHNHYTQKSLSLSPGK |
| 152 | ENFQCNVPLGMESGRIANEQISASSTYSDGRWTPQQSRLHGDDNGWTPNLDSNKEYLQVDLRFLTMLTAIATQGAISR |
| | ETQNGYYVKSYELEVSTNGEDWMVYEHGKNHKVFQANNDATEVVLNKLHAPLLTRFVRIRPQTWHSGIALRLELFGCG |
| | GGGSGGGGSGGGGSGGGGSEPKSCDKTHTCPPCPAPELLGGPSVFLFPPKPKDTLMISRTPEVTCVVVDVSHEDPEVK |
| | FNWYVDGVEVHNAKTKPREEQYNSTYRVVSVLTVLHQDWLNGKEYKCKVSNKALPAPIEKTISKAKGQPREPQVYTLP |
| | PSRDELTKNQVSLTCLVKGFYPSDIAVEWESNGQPENNYKTTPPVLDSDGSFFLYSKLTVDKSRWQQGNVFSCSVMHE |
| | ALHNHYTQKSLSLSPGK |
| 153 | ENFQCNVPLGMESGRIANEQISASSTYSDGRWTPQQSRLHGDDNGWTPNLDSNKEYLQVDLRFLTMLTAIATQGAISR |
| | ETQNGYYVKSYELEVSTNGEDWMVYEHGKNHKVFQANNDATEVVLNKLHAPLLTRFVRIRPQTWHSGIALRLELFGCG |
| | GGGSGGGGSGGGGSGGGGSCNVPLGMESGRIANEQISASSTYSDGRWTPQQSRLHGDDNGWTPNLDSNKEYLQVDLRF |
| | LTMLTAIATQGAISRETQNGYYVKSYELEVSTNGEDWMVYEHGKNHKVFQANNDATEVVLNKLHAPLLTRFVRIRPQT |
| | WHSGIALRLELFGCGGGGSGGGGSGGGGSGGGGSCNVPLGMESGRIANEQISASSTYSDGRWTPQQSRLHGDDNGWTP |
| | NLDSNKEYLQVDLRFLTMLTAIATQGAISRETQNGYYVKSYELEVSTNGEDWMVYEHGKNHKVFQANNDATEVVLNKL |
| | HAPLLTREVRIRPQTWHSGIALRLELFGCGGGGSGGGGSGGGGSGGGGSEPKSCDKTHTCPPCPAPELLGGPSVFLFP |
| | PKPKDTLMISRTPEVTCVVVDVSHEDPEVKFNWYVDGVEVHNAKTKPREEQYNSTYRVVSVLTVLHQDWLNGKEYKCK |
| | VSNKALPAPIEKTISKAKGQPREPQVYTLPPSRDELTKNQVSLTCLVKGFYPSDIAVEWESNGQPENNYKTTPPVLDS |
| | DGSFFLYSKLTVDKSRWQQGNVFSCSVMHEALHNHYTQKSLSLSPGK |
| 154 | ENFQCNVPLGMESGRIANEQISASSTYSDGRWTPQQSRLHGDDNGWTPNLDSNKEYLQVDLRFLTMLTAIATQGAISR |
| | ETQNGYYVKSYKLEVSTNGEDWMVYRHGKNHKVFQANNDATEVVLNKLHAPLLTRFVRIRPQTWHSGIALRLELFGCR |
| | VTDAPCSNMLGMLSGLIADSQISASSTQEYLWSPSAARLVSSRSGWFPRIPQAQPGEEWLQVDLGTPKTVKGVIIQGA |
| | RGGDSITAVEARAFVRKFKVSYSLNGKDWEYIQDPRTQQPKLFEGNMHYDTPDIRRFDPIPAQYVRVYPERWSPAGIG |
| | MRLEVLGCDWTDGAPAPAGAPAPATCPPCPAPEFLGGPSVFLFPPKPKDTLMISRTPEVTCVVVDVSQEDPEVQFNWY |
| | VDGVEVHNAKTKPREEQFNSTYRVVSVLTVLHQDWLNGKEYKCKVSNKGLPSSIEKTISKAKGQPREPQVYTLPPSQE |
| | EMTENQVSLTCLVKGFYPSDIAVEWESNGQPENNYKTTPPVLDSDGSFFLYSWLTVDKSRWQEGNVFSCSVMHEALHN |
| | HYTQKSLSLSLGK |
| 155 | ENFQCNVPLGMESGRIANEQISASSTYSDGRWTPQQSRLHGDDNGWTPNLDSNKEYLQVDLRFLTMLTAIATQGAISR |
| | ETQNGYYVKSYKLEVSTNGEDWMVYRHGKNHKVFQANNDATEVVLNKLHAPLLTRFVRIRPQTWHSGIALRLELFGCR |
| | VTDAPCSNMLGMLSGLIADSQISASSTQEYLWSPSAARLVSSRSGWFPRIPQAQPGEEWLQVDLGTPKTVKGVIIQGA |
| | RGGDSITAVEARAFVAAFAVSYSLNGKDWEYIQDPRTQQPKLFEGNMHYDTPDIRRFDPIPAQYVRVYPERWSPAGIG |
| | MRLEVLGCDWTDGAPAPAGAPAPATCPPCPAPELLGGPSVFLFPPKPKDTLMISRTPEVTCVVVDVSHEDPEVKFNWY |
| | VDGVEVHNAKTKPREEQYNSTYRVVSVLTVLHQDWLNGKEYKCKVSNKALPAPIEKTISKAKGQPREPQVYTLPPSRD |
| | ELTKNQVSLTCLVKGFYPSDIAVEWESNGQPENNYKTTPPVLDSDGSFFLYSKLTVDKSRWQQGNVFSCSVMHEALHN |
| | HYTQKSLSLSPGK |
| 156 | ENFQCNVPLGMESGRIANEQISASSTYSDGRWTPQQSRLHGDDNGWTPNLDSNKEYLQVDLRFLTMLTAIATQGAISR |
| | ETQNGYYVKSYKLEVSTNGEDWMVYRHGKNHKVFQANNDATEVVLNKLHAPLLTRFVRIRPQTWHSGIALRLELFGCR |
| | VTDAPCSNMLGMLSGLIADSQISASSTQEYLWSPSAARLVSSRSGWFPRIPQAQPGEEWLQVDLGTPKTVKGVIIQGA |
| | RGGDSITAVEARAFVEEFEVSYSLNGKDWEYIQDPRTQQPKLFEGNMHYDTPDIRRFDPIPAQYVRVYPERWSPAGIG |
| | MRLEVLGCDWTDGAPAPAGAPAPATCPPCPAPELLGGPSVFLFPPKPKDTLMISRTPEVTCVVVDVSHEDPEVKFNWY |
| | VDGVEVHNAKTKPREEQYNSTYRVVSVLTVLHQDWLNGKEYKCKVSNKALPAPIEKTISKAKGQPREPQVYTLPPSRD |
| | ELTKNQVSLTCLVKGFYPSDIAVEWESNGQPENNYKTTPPVLDSDGSFFLYSKLTVDKSRWQQGNVFSCSVMHEALHN |
| | HYTQKSLSLSPGK |
| 157 | TCPPCPAPEFLGGPSVFLFPPKPKDTLMISRTPEVTCVVVDVSQEDPEVQFNWYVDGVEVHNAKTKPREEQFNSTYRV |
| | VSVLTVLHQDWLNGKEYKCKVSNKGLPSSIEKTISKAKGQPREPQVYTLPPSQEEMTENQVSLTCLVKGFYPSDIAVE |
| | WESNGQPENNYKTTPPVLDSDGSFFLYSWLTVDKSRWQEGNVFSCSVMHEALHNHYTQKSLSLSLGKGAPAPAGAPAP |
| | AENFQCNVPLGMESGRIANEQISASSTYSDGRWTPQQSRLHGDDNGWTPNLDSNKEYLQVDLRFLTMLTAIATQGAIS |
| | RETQNGYYVKSYKLEVSTNGEDWMVYRHGKNHKVFQANNDATEVVLNKLHAPLLTRFVRIRPQTWHSGIALRLELFGC |
| | RVTDAPCSNMLGMLSGLIADSQISASSTQEYLWSPSAARLVSSRSGWFPRIPQAQPGEEWLQVDLGTPKTVKGVIIQG |
| | ARGGDSITAVEARAFVRKFKVSYSLNGKDWEYIQDPRTQQPKLFEGNMHYDTPDIRRFDPIPAQYVRVYPERWSPAGI |
| | GMRLEVLGCDWTD |
| 158 | TCPPCPAPEFLGGPSVFLFPPKPKDTLMISRTPEVTCVVVDVSQEDPEVQFNWYVDGVEVHNAKTKPREEQFNSTYRV |
| | VSVLTVLHQDWLNGKEYKCKVSNKGLPSSIEKTISKAKGQPREPQVYTLPPSQEEMTENQVSLTCLVKGFYPSDIAVE |
| | WESNGQPENNYKTTPPVLDSDGSFFLYSWLTVDKSRWQEGNVFSCSVMHEALHNHYTQKSLSLSLGKGAPAPAGAPAP |
| | ACNVPLGMESGRIANEQISASSTASDGRWTPQQSRLHGDDNGWAPNLASNKEYLQVDLRFLTMLTAIATQGAISRETQ |
| | NGYYVKSYKLEVSTNGEDWMVYRHGKNHKVFQANNDATEVVLNKLHAPLLTRFVRIRPQTWHSGIALRLELFGCRVTD |
| | APCSNMLGMLSGLIADSQISASSTQEYLWSPSAARLVSSRSGWFPRIPQAQPGEEWLQVDLGTPKTVKGVIIQGARGG |
| | DSITAVEARAFVEEFEVSYSLNGKDWEYIQDPRTQQPKLFEGNMHYDTPDIRRFDPIPAQYVRVYPERWSPAGIGMRL |
| | EVLGCDWTD |
| 159 | TCPPCPAPEFLGGPSVFLFPPKPKDTLMISRTPEVTCVVVDVSQEDPEVQFNWYVDGVEVHNAKTKPREEQFNSTYRV |
| | VSVLTVLHQDWLNGKEYKCKVSNKGLPSSIEKTISKAKGQPREPQVYTLPPSQEEMTENQVSLTCLVKGFYPSDIAVE |
| | WESNGQPENNYKTTPPVLDSDGSFFLYSWLTVDKSRWQEGNVFSCSVMHEALHNHYTQKSLSLSLGKGAPAPAGAPAP |
| | ACNVPLGMESGRIANEQISASSTASDGRWTPQQSRLHGDDNGWAPNLASNKEYLQVDLRFLTMLTAIATQGAISRETQ |
| | NGYYVKSYKLEVSTNGEDWMVYRHGKNHKVFQANNDATEVVLNKLHAPLLTRFVRIRPQTWHSGIALRLELFGCRVTD |
| | APCSNMLGMLSGLIADSQISASSTQEYLWSPSAARLVSSRSGWFPRIPQAQPGEEWLQVDLGTPKTVKGVIIQGARGG |
| | DSITAVEARAFVAAFAVSYSLNGKDWEYIQDPRTQQPKLFEGNMHYDTPDIRRFDPIPAQYVRVYPERWSPAGIGMRL |
| | EVLGCDWTD |
| 160 | ENFQCNVPLGMESGRIANEQISASSTYSDGRWTPQQSRLHGDDNGWTPNLDSNKEYLQVDLRFLTMLTAIATQGAISR |
| | ETQNGYYVKSYKLEVSTNGEDWMVYRHGKNHKVFQANNDATEVVLNKLHAPLLTRFVRIRPQTWHSGIALRLELFGCG |
| | GGGSGGGGSGGGGSGGGGSEPKSCDKTHTCPPCPAPELLGGPSVFLFPPKPKDTLMISRTPEVTCVVVDVSHEDPEVK |
| | FNWYVDGVEVHNAKTKPREEQYNSTYRVVSVLTVLHQDWLNGKEYKCKVSNKALPAPIEKTISKAKGQPREPQVYTLP |
| | PSRDELTKNQVSLTCLVKGFYPSDIAVEWESNGQPENNYKTTPPVLDSDGSFFLYSKLTVDKSRWQQGNVFSCSVMHE |
| | ALHNHYTQKSLSLSPGKGGGGSGGGGSGGGGSGGGGSCNVPLGMESGRIANEQISASSTYSDGRWTPQQSRLHGDDNG |
| | WTPNLDSNKEYLQVDLRFLTMLTAIATQGAISRETQNGYYVKSYKLEVSTNGEDWMVYRHGKNHKVFQANNDATEVVL |
| | NKLHAPLLTRFVRIRPQTWHSGIALRLELFGCDWTD |
| 161 | ENFQCNVPLGMESGRIANEQISASSTYSDGRWTPQQSRLHGDDNGWTPNLDSNKEYLQVDLRFLTMLTAIATQGAISR |
| | ETQNGYYVKSYKLEVSTNGEDWMVYRHGKNHKVFQANNDATEVVLNKLHAPLLTRFVRIRPQTWHSGIALRLELFGCG |
| | GGGSGGGGSGGGGSGGGGSCNVPLGMESGRIANEQISASSTYSDGRWTPQQSRLHGDDNGWTPNLDSNKEYLQVDLRF |
| | LTMLTAIATQGAISRETQNGYYVKSYKLEVSTNGEDWMVYRHGKNHKVFQANNDATEVVLNKLHAPLLTRFVRIRPQT |
| | WHSGIALRLELFGCGGGGSGGGGSGGGGSGGGGSEPKSCDKTHTCPPCPAPELLGGPSVFLFPPKPKDTLMISRTPEV |
| | TCVVVDVSHEDPEVKFNWYVDGVEVHNAKTKPREEQYNSTYRVVSVLTVLHQDWLNGKEYKCKVSNKALPAPIEKTIS |
| | KAKGQPREPQVYTLPPSRDELTKNQVSLTCLVKGFYPSDIAVEWESNGQPENNYKTTPPVLDSDGSFFLYSKLTVDKS |
| | RWQQGNVFSCSVMHEALHNHYTQKSLSLSPGKGGGGSGGGGSGGGGSGGGGSCNVPLGMESGRIANEQISASSTYSDG |
| | RWTPQQSRLHGDDNGWTPNLDSNKEYLQVDLRFLTMLTAIATQGAISRETQNGYYVKSYKLEVSTNGEDWMVYRHGKN |
| | HKVFQANNDATEVVLNKLHAPLLTRFVRIRPQTWHSGIALRLELFGCDWTD |
| 162 | ENFQCNVPLGMESGRIANEQISASSTYSDGRWTPQQSRLHGDDNGWTPNLDSNKEYLQVDLRFLTMLTAIATQGAISR |
| | ETQNGYYVKSYKLEVSTNGEDWMVYEHGKNHKVFQANNDATEVVLNKLHAPLLTRFVRIRPQTWHSGIALRLELFGCG |
| | GGGSGGGGSGGGGSGGGGSEPKSCDKTHTCPPCPAPELLGGPSVFLFPPKPKDTLMISRTPEVTCVVVDVSHEDPEVK |
| | FNWYVDGVEVHNAKTKPREEQYNSTYRVVSVLTVLHQDWLNGKEYKCKVSNKALPAPIEKTISKAKGQPREPQVYTLP |
| | PSRDELTKNQVSLTCLVKGFYPSDIAVEWESNGQPENNYKTTPPVLDSDGSFFLYSKLTVDKSRWQQGNVFSCSVMHE |
| | ALHNHYTQKSLSLSPGKGGGGSGGGGSGGGGSGGGGSCNVPLGMESGRIANEQISASSTYSDGRWTPQQSRLHGDDNG |
| | WTPNLDSNKEYLQVDLRFLTMLTAIATQGAISRETQNGYYVKSYKLEVSTNGEDWMVYEHGKNHKVFQANNDATEVVL |
| | NKLHAPLLTREVRIRPQTWHSGIALRLELFGCDWTD |
| 163 | ENFQCNVPLGMESGRIANEQISASSTYSDGRWTPQQSRLHGDDNGWTPNLDSNKEYLQVDLRFLTMLTAIATQGAISR |
| | ETQNGYYVKSYKLEVSTNGEDWMVYEHGKNHKVFQANNDATEVVLNKLHAPLLTRFVRIRPQTWHSGIALRLELFGCG |
| | GGGSGGGGSGGGGSGGGGSCNVPLGMESGRIANEQISASSTYSDGRWTPQQSRLHGDDNGWTPNLDSNKEYLQVDLRF |
| | LTMLTAIATQGAISRETQNGYYVKSYKLEVSTNGEDWMVYEHGKNHKVFQANNDATEVVLNKLHAPLLTRFVRIRPQT |
| | WHSGIALRLELFGCGGGGSGGGGSGGGGSGGGGSEPKSCDKTHTCPPCPAPELLGGPSVFLFPPKPKDTLMISRTPEV |
| | TCVVVDVSHEDPEVKFNWYVDGVEVHNAKTKPREEQYNSTYRVVSVLTVLHQDWLNGKEYKCKVSNKALPAPIEKTIS |
| | KAKGQPREPQVYTLPPSRDELTKNQVSLTCLVKGFYPSDIAVEWESNGQPENNYKTTPPVLDSDGSFFLYSKLTVDKS |
| | RWQQGNVFSCSVMHEALHNHYTQKSLSLSPGKGGGGSGGGGSGGGGSGGGGSCNVPLGMESGRIANEQISASSTYSDG |
| | RWTPQQSRLHGDDNGWTPNLDSNKEYLQVDLRFLTMLTAIATQGAISRETQNGYYVKSYKLEVSTNGEDWMVYEHGKN |
| | HKVFQANNDATEVVLNKLHAPLLTRFVRIRPQTWHSGIALRLELFGCDWTD |
| 164 | EDFKCMEALGMESGEIHSDQITASSQYSTNWSAERSRLNYPENGWTPGEDSYREWIQVDLGLLRFVTAVGTQGAISKE |
| | TKKKYYVKTYKIDVSSNGEDWITIKEGNKPVLFQGNTNPTDVVVAVFPKPLITRFVRIKPATWETGISMRFEVYGCGA |
| | PAPAGAPAPACSNMLGMLSGLIADSQISASSTQEYLWSPSAARLVSSRSGWFPRIPQAQPGEEWLQVDLGTPKTVKGV |
| | IIQGARGGDSITAVEARAFVRKFKVSYSLNGKDWEYIQDPRTQQPKLFEGNMHYDTPDIRRFDPIPAQYVRVYPERWS |
| | PAGIGMRLEVLGCGAPAPAGAPAPAEPKSCDKTHTCPPCPAPELLGGPSVFLFPPKPKDTLMISRTPEVTCVVVDVSH |
| | EDPEVKFNWYVDGVEVHNAKTKPREEQYNSTYRVVSVLTVLHQDWLNGKEYKCKVSNKALPAPIEKTISKAKGQPREP |
| | QVYTLPPSRDELTKNQVSLTCLVKGFYPSDIAVEWESNGQPENNYKTTPPVLDSDGSFFLYSKLTVDKSRWQQGNVFS |
| | CSVMHEALHNHYTQKSLSLSPGK |
| 165 | ENFQCNVPLGMESGRIANEQISASSTYSDGRWTPQQSRLHGDDNGWTPNLDSNKEYLQVDLRFLTMLTAIATQGAISR |
| | ETQNGYYVKSYKLEVSTNGEDWMVYRHGKNHKVFQANNDATEVVLNKLHAPLLTRFVRIRPQTWHSGIALRLELFGCG |
| | APAPAGAPAPACSGMLGMVSGLISDSQITSSNQGDRNWMPENIRLVTSRSGWALPPAPHSYINEWLQIDLGEEKIVRG |
| | IIIQGGKHRENKVFMRKFKIGYSNNGSDWKMIMDDSKRKAKSFEGNNNYDTPELRTFPALSTRFIRIYPERATHGGLG |
| | LRMELLGCGAPAPAGAPAPAEPKSCDKTHTCPPCPAPELLGGPSVFLFPPKPKDTLMISRTPEVTCVVVDVSHEDPEV |
| | KFNWYVDGVEVHNAKTKPREEQYNSTYRVVSVLTVLHQDWLNGKEYKCKVSNKALPAPIEKTISKAKGQPREPQVYTL |
| | PPSRDELTKNQVSLTCLVKGFYPSDIAVEWESNGQPENNYKTTPPVLDSDGSFFLYSKLTVDKSRWQQGNVFSCSVMH |
| | EALHNHYTQKSLSLSPGK |
| 166 | EDFKCMEALGMESGEIHSDQITASSQASTNWSAERSRLNYPENGWTPGEDSYREWIQVDLGLLRFVTAVGTQGAIAKE |
| | TKKKAYVKTYKIDVSSNGEDWITIKEGNKPVLFQGNTNPTDVVVAVFPKPLITRFVRIKPATWETGISMRFEVYGCGA |
| | PAPAGAPAPACSNMLGMLSGLIADSQISASSTQEYLWSPSAARLVSSRSGWFPRIPQAQPGEEWLQVDLGTPKTVKGV |
| | IIQGARGGDSITAVEARAFVRKFKVSYSLNGKDWEYIQDPRTQQPKLFEGNMHYDTPDIRRFDPIPAQYVRVYPERWS |
| | PAGIGMRLEVLGCGAPAPAGAPAPAEPKSCDKTHTCPPCPAPELLGGPSVFLFPPKPKDTLMISRTPEVTCVVVDVSH |
| | EDPEVKFNWYVDGVEVHNAKTKPREEQYNSTYRVVSVLTVLHQDWLNGKEYKCKVSNKALPAPIEKTISKAKGQPREP |
| | QVYTLPPSRDELTKNQVSLTCLVKGFYPSDIAVEWESNGQPENNYKTTPPVLDSDGSFFLYSKLTVDKSRWQQGNVFS |
| | CSVMHEALHNHYTQKSLSLSPGK |
| 167 | FRNDKCGDTIKIESPGYLTSPGYPHSYHPSEKCEWLIQAPDPYQRIMINFNPHFDLEDRDCKYDYVEVFDGENENGHF |
| | RGKFCGKIAPPPVVSSGPFLFIKFVSDYETHGAGFSIRYEIFKRGPECSQNYTTPSGVIKSPGFPEKYPNSLECTYIV |
| | FVPKMSEIILEFESFDLEPDSNPPGGMFCRYDRLEIWDGFPDVGPHIGRYCGQKTPGRIRSSSGILSMVFYTDSAIAK |
| | EGFSANYSVLQSSVSEDFKCMEALGMESGEIHSDQITASSQYSTNWSAERSRLNYPENGWTPGEDSYREWIQVDLGLL |
| | RFVTAVGTQGAISKETKKKYYVKTYKIDVSSNGEDWITIKEGNKPVLFQGNTNPTDVVVAVFPKPLITRFVRIKPATW |
| | ETGISMRFEVYGCKITDYPCSGMLGMVSGLISDSQITSSNQGDRNWMPENIRLVTSRSGWALPPAPHSYINEWLQIDL |
| | GEEKIVRGIIIQGGKHRENKVFMRKFKIGYSNNGSDWKMIMDDSKRKAKSFEGNNNYDTPELRTFPALSTRFIRIYPE |
| | RATHGGLGLRMELLGCEVEAECPPCPAPPVAGPSVFLFPPKPKDTLMISRTPEVTCVVVDVSHEDPEVQFNWYVDGVE |
| | VHNAKTKPREEQFNSTFRVVSVLTVVHQDWLNGKEYKCKVSNKGLPAPIEKTISKTKGQPREPQVYTLPPSREEMTKN |
| | QVSLTCLVKGFYPSDISVEWESNGQPENNYKTTPPMLDSDGSFFLYSKLTVDKSRWQQGNVFSCSVMHEALHNHYTQK |
| | SLSLSPGK |
| 168 | FRGKFCGKIAPPPVVSSGPFLFIKFVSDYETHGAGFSIRYEIFKRGPECSQNYTTPSGVIKSPGFPEKYPNSLECTYI |
| | VFVPKMSEIILEFESFDLEPDSNPPGGMFCRYDRLEIWDGFPDVGPHIGRYCGQKTPGRIRSSSGILSMVFYTDSAIA |
| | KEGFSANYSVLQSSVSEDFKCMEALGMESGEIHSDQITASSQYSTNWSAERSRLNYPENGWTPGEDSYREWIQVDLGL |
| | LRFVTAVGTQGAISKETKKKYYVKTYKIDVSSNGEDWITIKEGNKPVLFQGNTNPTDVVVAVFPKPLITRFVRIKPAT |
| | WETGISMRFEVYGCKITDYPEPRGPTIKPCPPCKCPAPNLLGGPSVFIFPPKIKDVLMISLSPIVTCVVVDVSEDDPD |
| | VQISWFVNNVEVHTAQTQTHREDYNSTLRVVSALPIQHQDWMSGKEFKCKVNNKDLPAPIERTISKPKGSVRAPQVYV |
| | LPPPEEEMTKKQVTLTCMVTDFMPEDIYVEWTNNGKTELNYKNTEPVLDSDGSYFMYSKLRVEKKNWVERNSYSCSVV |
| | HEGLHNHHTTKSFSRTPGK |
| 191 | EDFKCMEALGMESGEIHSDQITASSQYSTNWSAERSRLNYPENGWTPGEDSYREWIQVDLGLLRFVTAVGTQGAISKE |
| | TKKKYYVKTYKIDVSSNGEDWITIKEGNKPVLFQGNTNPTDVVVAVFPKPLITRFVRIKPATWETGISMRFEVYGCKI |
| | TDYPCSGMLGMVSGLISDSQITSSNQGDRNWMPENIRLVTSRSGWALPPAPHSYINEWLQIDLGEEKIVRGIIIQGGK |
| | HRENKVFMRKFKIGYSNNGSDWKMIMDDSKRKAKSFEGNNNYDTPELRTFPALSTRFIRIYPERATHGGLGLRMELLG |
| | CGGGGSGGGGSEPKSCDKTHTCPPCPAPELLGGPSVFLFPPKPKDTLMISRTPEVTCVVVDVSHEDPEVKFNWYVDGV |
| | EVHNAKTKPREEQYNSTYRVVSVLAVLHQDWLNGKEYKCKVSNKALPAPIEKTISKAKGQPREPQVYTLPPSRDELTK |
| | NQVSLTCLVKGFYPSDIAVAWESNGQPENNYKTTPPVLDSDGSFFLYSKLTVDKSRWQQGNVFSCSVMHEALHAHYTQ |
| | KSLSLSPGK |
| 192 | EDFKCMEALGMESGEIHSDQITASSQYSTNWSAERSRLNYPENGWTPGEDSYREWIQVDLGLLRFVTAVGTQGAISKE |
| | TKKKYYVKTYKIDVSSNGEDWITIKEGNKPVLFQGNTNPTDVVVAVFPKPLITRFVRIKPATWETGISMRFEVYGCKI |
| | TDYPCSGMLGMVSGLISDSQITSSNQGDRNWMPENIRLVTSRSGWALPPAPHSYINEWLQIDLGEEKIVRGIIIQGGK |
| | HRENKVFMRKFKIGYSNNGSDWKMIMDDSKRKAKSFEGNNNYDTPELRTFPALSTRFIRIYPERATHGGLGLRMELLG |
| | CGGGGSGGGGSEPKSCDKTHTCPPCPAPELLGGPSVFLFPPKPKDTLMISRTPEVTCVVVDVSHEDPEVKFNWYVDGV |
| | EVHNAKTKPREEQYNSTYRVVSVLTVLHQDWLNGKEYKCKVSNKALPAPIEKTISKAKGQPREPQVYTLPPSRDELTK |
| | NQVSLTCLVKGFYPSDIAVEWESNGQPENNYKTTPPVLDSDGSFFLYSKLTVDKSRWQQGNVFSCSVMHEALHNHYTQ |
| | KSLSLSPGKGGGGSGGGGSGGGGSEEQAKTFLDKFNHEAEDLFYQSSGLGKGDFR |
| 193 | EDFKCMEALGMESGEIHSDQITASSQASTNWSAERSRLNYPENGWTPGEDSYREWIQVDLGLLRFVTAVGTQGAIAKE |
| | TKKKAYVKTYKIDVSSNGEDWITIKEGNKPVLFQGNTNPTDVVVAVFPKPLITRFVRIKPATWETGISMRFEVYGCKI |
| | TDYPCSGMLGMVSGLISDSQITSSNQGDRNWMPENIRLVTSRSGWALPPAPHSYINEWLQIDLGEEKIVRGIIIQGGK |
| | HRENKVFMRKFKIGYSNNGSDWKMIMDDSKRKAKSFEGNNNYDTPELRTFPALSTRFIRIYPERATHGGLGLRMELLG |
| | CGGGGSGGGGSEPKSCDKTHTCPPCPAPELLGGPSVFLFPPKPKDTLMISRTPEVTCVVVDVSHEDPEVKFNWYVDGV |
| | EVHNAKTKPREEQYNSTYRVVSVLTVLHQDWLNGKEYKCKVSNKALPAPIEKTISKAKGQPREPQVYTLPPSRDELTK |
| | NQVSLTCLVKGFYPSDIAVEWESNGQPENNYKTTPPVLDSDGSFFLYSKLTVDKSRWQQGNVFSCSVMHEALHNHYTQ |
| | KSLSLSPGK |
| 194 | ENFQCNVPLGMESGRIANEQISASSTYSDGRWTPQQSRLHGDDNGWTPNLDSNKEYLQVDLRFLTMLTAIATQGAISR |
| | ETQNGYYVKSYKLEVSTNGEDWMVYRHGKNHKVFQANNDATEVVLNKLHAPLLTRFVRIRPQTWHSGIALRLELFGCR |
| | VTDAPCSNMLGMLSGLIADSQISASSTQEYLWSPSAARLVSSRSGWFPRIPQAQPGEEWLQVDLGTPKTVKGVIIQGA |
| | RGGDSITAVEARAFVRKFKVSYSLNGKDWEYIQDPRTQQPKLFEGNMHYDTPDIRRFDPIPAQYVRVYPERWSPAGIG |
| | MRLEVLGCGAPAPAGAPAPAEPKSCDKTHTCPPCPAPELLGGPSVFLFPPKPKDTLMISRTPEVTCVVVDVSHEDPEV |
| | KFNWYVDGVEVHNAKTKPREEQYNSTYRVVSVLTVLHQDWLNGKEYKCKVSNKALPAPIEKTISKAKGQPREPQVYTL |
| | PPSRDELTKNQVSLTCLVKGFYPSDIAVEWESNGQPENNYKTTPPVLDSDGSFFLYSKLTVDKSRWQQGNVFSCSVMH |
| | EALHNHYTQKSLSLSPGK |
| 195 | EDFKCMEALGMESGEIHSDQITASSQYSTNWSAERSRLNYPENGWTPGEDSYREWIQVDLGLLRFVTAVGTQGAISKE |
| | TKKKYYVKTYKIDVSSNGEDWITIKEGNKPVLFQGNTNPTDVVVAVFPKPLITRFVRIKPATWETGISMRFEVYGCGG |
| | GGSGGGGSGGGGSGGGGSEPKSCDKTHTCPPCPAPELLGGPSVFLFPPKPKDTLMISRTPEVTCVVVDVSHEDPEVKF |
| | NWYVDGVEVHNAKTKPREEQYNSTYRVVSVLTVLHQDWLNGKEYKCKVSNKALPAPIEKTISKAKGQPREPQVYTLPP |
| | SRDELTKNQVSLTCLVKGFYPSDIAVEWESNGQPENNYKTTPPVLDSDGSFFLYSKLTVDKSRWQQGNVFSCSVMHEA |
| | LHNHYTQKSLSLSPGK |
| 196 | EDFKCMEALGMESGEIHSDQITASSQYSTNWSAERSRLNYPENGWTPGEDSYREWIQVDLGLLRFVTAVGTQGAISKE |
| | TKKKYYVKTYKIDVSSNGEDWITIEEGNKPVLFQGNTNPTDVVVAVFPKPLITRFVRIKPATWETGISMRFEVYGCGA |
| | PAPAGAPAPAGAPAPAGAPAPACMEALGMESGEIHSDQITASSQYSTNWSAERSRLNYPENGWTPGEDSYREWIQVDL |
| | GLLRFVTAVGTQGAISKETKKKYYVKTYKIDVSSNGEDWITIEEGNKPVLFQGNTNPTDVVVAVFPKPLITRFVRIKP |
| | ATWETGISMRFEVYGCGAPAPAGAPAPAGAPAPAGAPAPAEPKSCDKTHTCPPCPAPELLGGPSVFLFPPKPKDTLMI |
| | SRTPEVTCVVVDVSHEDPEVKFNWYVDGVEVHNAKTKPREEQYNSTYRVVSVLTVLHQDWLNGKEYKCKVSNKALPAP |
| | IEKTISKAKGQPREPQVYTLPPSRDELTKNQVSLTCLVKGFYPSDIAVEWESNGQPENNYKTTPPVLDSDGSFFLYSK |
| | LTVDKSRWQQGNVFSCSVMHEALHNHYTQKSLSLSPGK |
| 197 | EDFKCMEALGMESGEIHSDQITASSQYSTNWSAERSRLNYPENGWTPGEDSYREWIQVDLGLLRFVTAVGTQGAISKE |
| | TKKKYYVKTYKIDVSSNGEDWITIEEGNKPVLFQGNTNPTDVVVAVFPKPLITRFVRIKPATWETGISMRFEVYGCGA |
| | PAPAGAPAPAGAPAPAGAPAPACMEALGMESGEIHSDQITASSQYSTNWSAERSRLNYPENGWTPGEDSYREWIQVDL |
| | GLLRFVTAVGTQGAISKETKKKYYVKTYKIDVSSNGEDWITIEEGNKPVLFQGNTNPTDVVVAVFPKPLITRFVRIKP |
| | ATWETGISMRFEVYGCGAPAPAGAPAPAGAPAPAGAPAPACMEALGMESGEIHSDQITASSQYSTNWSAERSRLNYPE |
| | NGWTPGEDSYREWIQVDLGLLRFVTAVGTQGAISKETKKKYYVKTYKIDVSSNGEDWITIEEGNKPVLFQGNTNPTDV |
| | VVAVFPKPLITRFVRIKPATWETGISMRFEVYGCGAPAPAGAPAPAGAPAPAGAPAPAEPKSCDKTHTCPPCPAPELL |
| | GGPSVFLFPPKPKDTLMISRTPEVTCVVVDVSHEDPEVKFNWYVDGVEVHNAKTKPREEQYNSTYRVVSVLTVLHQDW |
| | LNGKEYKCKVSNKALPAPIEKTISKAKGQPREPQVYTLPPSRDELTKNQVSLTCLVKGFYPSDIAVEWESNGQPENNY |
| | KTTPPVLDSDGSFFLYSKLTVDKSRWQQGNVFSCSVMHEALHNHYTQKSLSLSPGK |
| 198 | EDFKCMEALGMESGEIHSDQITASSQYSTNWSAERSRLNYPENGWTPGEDSYREWIQVDLGLLRFVTAVGTQGAISKE |
| | TKKKYYVKTYKIDVSSNGEDWITIEEGNKPVLFQGNTNPTDVVVAVFPKPLITRFVRIKPATWETGISMRFEVYGCGA |
| | PAPAGAPAPAGAPAPAGAPAPAEPKSCDKTHTCPPCPAPELLGGPSVFLFPPKPKDTLMISRTPEVTCVVVDVSHEDP |
| | EVKFNWYVDGVEVHNAKTKPREEQYNSTYRVVSVLTVLHQDWLNGKEYKCKVSNKALPAPIEKTISKAKGQPREPQVY |
| | TLPPSRDELTKNQVSLTCLVKGFYPSDIAVEWESNGQPENNYKTTPPVLDSDGSFFLYSKLTVDKSRWQQGNVFSCSV |
| | MHEALHNHYTQKSLSLSPGKGAPAPAGAPAPAGAPAPAGAPAPACMEALGMESGEIHSDQITASSQYSTNWSAERSRL |
| | NYPENGWTPGEDSYREWIQVDLGLLRFVTAVGTQGAISKETKKKYYVKTYKIDVSSNGEDWITIEEGNKPVLFQGNTN |
| | PTDVVVAVFPKPLITREVRIKPATWETGISMRFEVYGCEVEA |
| 199 | ENFQCNVPLGMESGRIANEQISASSTYSDGRWTPQQSRLHGDDNGWTPNLDSNKEYLQVDLRFLTMLTAIATQGAISR |
| | ETQNGYYVKSYKLEVSTNGEDWMVYEHGKNHKVFQANNDATEVVLNKLHAPLLTRFVRIRPQTWHSGIALRLELFGCG |
| | APAPAGAPAPAGAPAPAGAPAPACNVPLGMESGRIANEQISASSTYSDGRWTPQQSRLHGDDNGWTPNLDSNKEYLQV |
| | DLRFLTMLTAIATQGAISRETQNGYYVKSYKLEVSTNGEDWMVYEHGKNHKVFQANNDATEVVLNKLHAPLLTRFVRI |
| | RPQTWHSGIALRLELFGCGAPAPAGAPAPAGAPAPAGAPAPAEPKSCDKTHTCPPCPAPELLGGPSVFLFPPKPKDTL |
| | MISRTPEVTCVVVDVSHEDPEVKFNWYVDGVEVHNAKTKPREEQYNSTYRVVSVLTVLHQDWLNGKEYKCKVSNKALP |
| | APIEKTISKAKGQPREPQVYTLPPSRDELTKNQVSLTCLVKGFYPSDIAVEWESNGQPENNYKTTPPVLDSDGSFFLY |
| | SKLTVDKSRWQQGNVFSCSVMHEALHNHYTQKSLSLSPGK |
| 200 | ENFQCNVPLGMESGRIANEQISASSTYSDGRWTPQQSRLHGDDNGWTPNLDSNKEYLQVDLRFLTMLTAIATQGAISR |
| | ETQNGYYVKSYKLEVSTNGEDWMVYEHGKNHKVFQANNDATEVVLNKLHAPLLTRFVRIRPQTWHSGIALRLELFGCG |
| | APAPAGAPAPAGAPAPAGAPAPACNVPLGMESGRIANEQISASSTYSDGRWTPQQSRLHGDDNGWTPNLDSNKEYLQV |
| | DLRFLTMLTAIATQGAISRETQNGYYVKSYKLEVSTNGEDWMVYEHGKNHKVFQANNDATEVVLNKLHAPLLTRFVRI |
| | RPQTWHSGIALRLELFGCGAPAPAGAPAPAGAPAPAGAPAPACNVPLGMESGRIANEQISASSTYSDGRWTPQQSRLH |
| | GDDNGWTPNLDSNKEYLQVDLRFLTMLTAIATQGAISRETQNGYYVKSYKLEVSTNGEDWMVYEHGKNHKVFQANNDA |
| | TEVVLNKLHAPLLTREVRIRPQTWHSGIALRLELFGCGAPAPAGAPAPAGAPAPAGAPAPAEPKSCDKTHTCPPCPAP |
| | ELLGGPSVFLFPPKPKDTLMISRTPEVTCVVVDVSHEDPEVKFNWYVDGVEVHNAKTKPREEQYNSTYRVVSVLTVLH |
| | QDWLNGKEYKCKVSNKALPAPIEKTISKAKGQPREPQVYTLPPSRDELTKNQVSLTCLVKGFYPSDIAVEWESNGQPE |
| | NNYKTTPPVLDSDGSFFLYSKLTVDKSRWQQGNVFSCSVMHEALHNHYTQKSLSLSPGK |
| 201 | ENFQCNVPLGMESGRIANEQISASSTYSDGRWTPQQSRLHGDDNGWTPNLDSNKEYLQVDLRFLTMLTAIATQGAISRETQNGYY |
| | VKSYKLEVSTNGEDWMVYEHGKNHKVFQANNDATEVVLNKLHAPLLTRFVRIRPQTWHSGIALRLELFGCGAPAPAGAPAPAGAP |
| | APAGAPAPAEPKSCDKTHTCPPCPAPELLGGPSVFLFPPKPKDTLMISRTPEVTCVVVDVSHEDPEVKFNWYVDGVEVHNAKTKP |
| | REEQYNSTYRVVSVLTVLHQDWLNGKEYKCKVSNKALPAPIEKTISKAKGQPREPQVYTLPPSRDELTKNQVSLTCLVKGFYPSD |
| | IAVEWESNGQPENNYKTTPPVLDSDGSFFLYSKLTVDKSRWQQGNVFSCSVMHEALHNHYTQKSLSLSPGKGAPAPAGAPAPAGA |
| | PAPAGAPAPACNVPLGMESGRIANEQISASSTYSDGRWTPQQSRLHGDDNGWTPNLDSNKEYLQVDLRFLTMLTAIATQGAISRE |
| | TQNGYYVKSYKLEVSTNGEDWMVYEHGKNHKVFQANNDATEVVLNKLHAPLLTRFVRIRPQTWHSGIALRLELFGCDWTD |
| 202 | FRNDKCGDTIKIESPGYLTSPGYPHSYHPSEKCEWLIQAPDPYQRIMINFNPHFDLEDRDCKYDYVEVFDGENENGHFRGKFCGK |
| | IAPPPVVSSGPFLFIKFVSDYETHGAGFSIRYEIFKRGPECSQNYTTPSGVIKSPGFPEKYPNSLECTYIVFVPKMSEIILEFES |
| | FDLEPDSNPPGGMFCRYDRLEIWDGFPDVGPHIGRYCGQKTPGRIRSSSGILSMVFYTDSAIAKEGFSANYSVLQSSVSEDFKCM |
| | EALGMESGEIHSDQITASSQYSTNWSAERSRLNYPENGWTPGEDSYREWIQVDLGLLRFVTAVGTQGAISKETKKKYYVKTYKID |
| | VSSNGEDWITIKEGNKPVLFQGNTNPTDVVVAVFPKPLITRFVRIKPATWETGISMRFEVYGCKITDYPCSGMLGMVSGLISDSQ |
| | ITSSNQGDRNWMPENIRLVTSRSGWALPPAPHSYINEWLQIDLGEEKIVRGIIIQGGKHRENKVFMRKFKIGYSNNGSDWKMIMD |
| | DSKRKAKSFEGNNNYDTPELRTFPALSTRFIRIYPERATHGGLGLRMELLGCEVEAPTAGPTTPNGNLVDECDDDQANCHSGTGD |
| | DFQLTGGTTVLATEKPTVIDSTIQSEFPTYGFNCEFGWGSHKTFCHWEHDNHVQLKWSVLTSKTGPIQDHTGDGNFTYSQADENQ |
| | KGKVARLVSPVVYSQNSAHCMTFWYHMSGSHVGTLRVKLRYQKPEEYDQLVWMAIGHQGDHWKEGRVLLHKSLKLYQVIFEGEIG |
| | KGNLGGIAVDDISINNHISQEDCAKPADLDKKNPEIKIDETGSTPGYEGEGEGDKNISRKPGNVLKTLDPECPPCPAPPVAGPSV |
| | FLFPPKPKDTLMISRTPEVTCVVVDVSHEDPEVQFNWYVDGVEVHNAKTKPREEQFNSTFRVVSVLTVVHQDWLNGKEYKCKVSN |
| | KGLPAPIEKTISKTKGQPREPQVYTLPPSREEMTKNQVSLTCLVKGFYPSDISVEWESNGQPENNYKTTPPMLDSDGSFFLYSKL |
| | TVDKSRWQQGNVFSCSVMHEALHNHYTQKSLSLSPGK |
| 203 | EDFKCMEALGMESGEIHSDQITASSQYSTNWSAERSRLNYPENGWTPGEDSYREWIQVDLGLLRFVTAVGTQGAISKETKKKYYV |
| | KTYKIDVSSNGEDWITIKEGNKPVLFQGNTNPTDVVVAVFPKPLITRFVRIKPATWETGISMRFEVYGCKITDYPCSGMLGMVSG |
| | LISDSQITSSNQGDRNWMPENIRLVTSRSGWALPPAPHSYINEWLQIDLGEEKIVRGIIIQGGKHRENKVFMRKFKIGYSNNGSD |
| | WKMIMDDSKRKAKSFEGNNNYDTPELRTFPALSTRFIRIYPERATHGGLGLRMELLGCGGGGSGGGGSEPKSCDKTHTCPPCPAP |
| | ELLGGPSVFLFPPKPKDTLMISRTPEVTCVVVDVSHEDPEVKFNWYVDGVEVHNAKTKPREEQYASTYRVVSVLAVLHQDWLNGK |
| | EYKCKVSNKALPAPIEKTISKAKGQPREPQVYTLPPSRDELTKNQVSLTCLVKGFYPSDIAVAWESNGQPENNYKTTPPVLDSDG |
| | SFFLYSKLTVDKSRWQQGNVFSCSVMHEALHAHYTQKSLSLSPGKGGGGSGGGGSEEQAKTFLDKFNHEAEDLFYQSSGLGKGDF |
| | R |
| 204 | EDFKCMEALGMESGEIHSDQITASSQYSTNWSAERSRLNYPENGWTPGEDSYREWIQVDLGLLRFVTAVGTQGAISKETKKKYYV |
| | KTYEIDVSSNGEDWITIEEGNKPVLFQGNTNPTDVVVAVFPKPLITRFVRIKPATWETGISMRFEVYGCKITDYPCSGMLGMVSG |
| | LISDSQITSSNQGDRNWMPENIRLVTSRSGWALPPAPHSYINEWLQIDLGEEKIVRGIIIQGGKHRENKVFMEEFEIGYSNNGSD |
| | WKMIMDDSKRKAKSFEGNNNYDTPELRTFPALSTRFIRIYPERATHGGLGLRMELLGCGGGGSGGGGSEPKSCDKTHTCPPCPAP |
| | ELLGGPSVFLFPPKPKDTLMISRTPEVTCVVVDVSHEDPEVKFNWYVDGVEVHNAKTKPREEQYNSTYRVVSVLTVLHQDWLNGK |
| | EYKCKVSNKALPAPIEKTISKAKGQPREPQVYTLPPSRDELTKNQVSLTCLVKGFYPSDIAVEWESNGQPENNYKTTPPVLDSDG |
| | SFFLYSKLTVDKSRWQQGNVFSCSVMHEALHNHYTQKSLSLSPGKGGGGSGGGGSEEQAKTFLDKFNHEAEDLFYQSSGLGKGDF |
| | R |
| 205 | EDFKCMEALGMESGEIHSDQITASSQYSTNWSAERSRLNYPENGWTPGEDSYREWIQVDLGLLRFVTAVGTQGAISKETKKKYYV |
| | KTYKIDVSSNGEDWITIKEGNKPVLFQGNTNPTDVVVAVFPKPLITRFVRIKPATWETGISMRFEVYGCKITDYPCSGMLGMVSG |
| | LISDSQITSSNQGDRNWMPENIRLVTSRSGWALPPAPHSYINEWLQIDLGEEKIVRGIIIQGGKHRENKVFMRKFKIGYSNNGSD |
| | WKMIMDDSKRKAKSFEGNNNYDTPELRTFPALSTRFIRIYPERATHGGLGLRMELLGCGGGGSGGGGSEPKSCDKTHTCPPCPAP |
| | ELLGGPSVFLFPPKPKDTLMISRTPEVTCVVVDVSHEDPEVKFNWYVDGVEVHNAKTKPREEQYNSTYRVVSVLTVLHQDWLNGK |
| | EYKCKVSNKALPAPIEKTISKAKGQPREPQVYTLPPSRDELTKNQVSLTCLVKGFYPSDIAVEWESNGQPENNYKTTPPVLDSDG |
| | SFFLYSKLTVDKSRWQQGNVFSCSVMHEALHNHYTQKSLSLSPGKGGGGSGGGGSGGGGSEEQAKTFLDKFNHEAEDLFYQSSGL |
| | GKGDFRGGGGSGGGGSGGGGSEEQAKTFLDKFNHEAEDLFYQSSGLGKGDFR |
| 206 | EDFKCMEALGMESGEIHSDQITASSQYSTNWSAERSRLNYPENGWTPGEDSYREWIQVDLGLLRFVTAVGTQGAISKETKKKYYV |
| | KTYKIDVSSNGEDWITIKEGNKPVLFQGNTNPTDVVVAVFPKPLITRFVRIKPATWETGISMRFEVYGDKITDYPCSNMLGMLSG |
| | LIADSQISASSTQEYLWSPSAARLVSSRSGWFPRIPQAQPGEEWLQVDLGTPKTVKGVIIQGARGGDSITAVEARAFVRKFKVSY |
| | SLNGKDWEYIQDPRTQQPKLFEGNMHYDTPDIRRFDPIPAQYVRVYPERWSPAGIGMRLEVLGCGGGGSGGGGSEPKSCDKTHTC |
| | PPCPAPELLGGPSVFLFPPKPKDTLMISRTPEVTCVVVDVSHEDPEVKFNWYVDGVEVHNAKTKPREEQYNSTYRVVSVLTVLHQ |
| | DWLNGKEYKCKVSNKALPAPIEKTISKAKGQPREPQVYTLPPSRDELTKNQVSLTCLVKGFYPSDIAVEWESNGQPENNYKTTPP |
| | VLDSDGSFFLYSKLTVDKSRWQQGNVFSCSVMHEALHNHYTQKSLSLSPGK |
| 207 | ENFQCNVPLGMESGRIANEQISASSTYSDGRWTPQQSRLHGDDNGWTPNLDSNKEYLQVDLRFLTMLTAIATQGAISRETQNGYY |
| | VKSYKLEVSTNGEDWMVYRHGKNHKVFQANNDATEVVLNKLHAPLLTRFVRIRPQTWHSGIALRLELFGCRVTDAPCSGMLGMVS |
| | GLISDSQITSSNQGDRNWMPENIRLVTSRSGWALPPAPHSYINEWLQIDLGEEKIVRGIIIQGGKHRENKVFMRKFKIGYSNNGS |
| | DWKMIMDDSKRKAKSFEGNNNYDTPELRTFPALSTRFIRIYPERATHGGLGLRMELLGCGGGGSGGGGSEPKSCDKTHTCPPCPA |
| | PELLGGPSVFLFPPKPKDTLMISRTPEVTCVVVDVSHEDPEVKFNWYVDGVEVHNAKTKPREEQYNSTYRVVSVLTVLHQDWLNG |
| | KEYKCKVSNKALPAPIEKTISKAKGQPREPQVYTLPPSRDELTKNQVSLTCLVKGFYPSDIAVEWESNGQPENNYKTTPPVLDSD |
| | GSFFLYSKLTVDKSRWQQGNVFSCSVMHEALHNHYTQKSLSLSPGK |
| 208 | EDFKCMEALGMESGEIHSDQITASSQASTNWSAERSRLNYPENGWTPGEDSYREWIQVDLGLLRFVTAVGTQGAIAKETKKKAYV |
| | KTYKIDVSSNGEDWITIKEGNKPVLFQGNTNPTDVVVAVFPKPLITRFVRIKPATWETGISMRFEVYGCKITDYPCSNMLGMLSG |
| | LIADSQISASSTQEYLWSPSAARLVSSRSGWFPRIPQAQPGEEWLQVDLGTPKTVKGVIIQGARGGDSITAVEARAFVRKFKVSY |
| | SLNGKDWEYIQDPRTQQPKLFEGNMHYDTPDIRRFDPIPAQYVRVYPERWSPAGIGMRLEVLGCGGGGSGGGGSEPKSCDKTHTC |
| | PPCPAPELLGGPSVFLFPPKPKDTLMISRTPEVTCVVVDVSHEDPEVKFNWYVDGVEVHNAKTKPREEQYNSTYRVVSVLTVLHQ |
| | DWLNGKEYKCKVSNKALPAPIEKTISKAKGQPREPQVYTLPPSRDELTKNQVSLTCLVKGFYPSDIAVEWESNGQPENNYKTTPP |
| | VLDSDGSFFLYSKLTVDKSRWQQGNVFSCSVMHEALHNHYTQKSLSLSPGK |
| 209 | ENFQCNVPLGMESGRIANEQISASSTYSDGRWTPQQSRLHGDDNGWTPNLDSNKEYLQVDLRFLTMLTAIATQGAISRETQNGYY |
| | VKSYKLEVSTNGEDWMVYRHGKNHKVFQANNDATEVVLNKLHAPLLTRFVRIRPQTWHSGIALRLELFGCRVTDAPCSNMLGMLS |
| | GLIADSQISASSTQEYLWSPSAARLVSSRSGWFPRIPQAQPGEEWLQVDLGTPKTVKGVIIQGARGGDSITAVEARAFVRKFKVS |
| | YSLNGKDWEYIQDPRTQQPKLFEGNMHYDTPDIRRFDPIPAQYVRVYPERWSPAGIGMRLEVLGCGGGGSGGGGSERKCCVECPP |
| | CPAPPVAGPSVFLFPPKPKDTLMISRTPEVTCVVVDVSHEDPEVQFNWYVDGVEVHNAKTKPREEQFNSTFRVVSVLTVVHQDWL |
| | NGKEYKCKVSNKGLPAPIEKTISKTKGQPREPQVYTLPPSREEMTKNQVSLTCLVKGFYPSDIAVEWESNGQPENNYKTTPPMLD |
| | SDGSFFLYSKLTVDKSRWQQGNVFSCSVMHEALHNHYTQKSLSLSPGK |

TABLE 22
Binding assay strategy results.

| | | | | | | Reduced | | | | | Heparin |
|---|---|---|---|---|---|---|---|---|---|---|---|
| SEQ ID | | | | NRP | NRP | heparin | VEGF | b1 | b1b2 | Length | affinity |
| NO. | Structure | Mutation | Strategy | 1 | 2 | mutation | binding | No. | No. | (monomer) | column |
| 113 | b1-Fc | WT | single b1 | Yes | No | No | Unmodified | 1 | | 396 | no binding |
| 114 | b1-Fc | K373E, | single b1, heparin binding | Yes | No | Yes | Unmodified | 1 | | 406 | no binding |
| | | | ↓(E) in b1 | | | | | | | | |
| 115 | b1b1-Fc | K373E, | double b1, heparin binding | Yes | No | Yes | Unmodified | 2 | | 576 | no binding |
| | | | ↓ (E) in b1 | | | | | | | | |
| 116 | b1b1b1-Fc | K373E, | triple b1, heparin binding ↓ | Yes | No | Yes | Unmodified | 3 | | 746 | no binding |
| | | | (E) in b1 | | | | | | | | |
| 117 | b1-Fc | Y297A, | single b1, no VEGF | Yes | No | Yes | Removed | 1 | | 406 | |
| | | S345A, | binding | | | | | | | | |
| | | Y353A, | | | | | | | | | |
| | | K373E | | | | | | | | | |
| 118 | b1b1b1-Fc | Y297A, | triple b1, no VEGF binding | Yes | No | Yes | Removed | 3 | | 746 | |
| | | S345A, | | | | | | | | | |
| | | Y353A, | | | | | | | | | |
| | | K373E | | | | | | | | | |
| 119 | b1-Fc | K358E, | single b1, heparin binding ↓ | Yes | No | Yes | Unmodified | 1 | | 406 | |
| | | K373E | in b1 (two site) | | | | | | | | |
| 120 | b1b1b1-Fc | K358E, | triple b1, heparin binding ↓ | Yes | No | Yes | Unmodified | 3 | | 746 | |
| | | K373E | in b1 (two site) | | | | | | | | |
| 121 | b1b1-b1b1-Fc | WT | quadruple b1 | Yes | No | No | Unmodified | 4 | | 868 | binding to |
| | | | | | | | | | | | heparin |
| 122 | b1b2-Fc | WT | single b1b2 | Yes | No | No | Unmodified | | 1 | 555 | binding to |
| | | | | | | | | | | | heparin |
| 123 | b1b2-Fc | E319A | single b1b2 (VEGF binding | Yes | No | No | Increased | | 1 | 551 | |
| | | | ↑) | | | | | | | | |
| 124 | b1b2-Fc | K351A | single b1b2 (VEGF binding | Yes | No | No | Decreased | | 1 | 551 | binding to |
| | | | ↓) | | | | | | | | heparin |
| 125 | b1b2-Fc | Y297A, | single b1b2, no VEGF | Yes | No | No | Removed | | 1 | 551 | binding to |
| | | S345A, | binding | | | | | | | | heparin |
| | | Y353A | | | | | | | | | |
| 126 | b1b2-Fc | R513E, | single b1b2, heparin | Yes | No | Yes | Unmodified | | 1 | 552 | |
| | | K514E, | binding↓ (E) in b2 | | | | | | | | |
| | | K516E | | | | | | | | | |
| 127 | b1b2-Fc | R513A, | single b1b2, heparin | Yes | No | Yes | Unmodified | | 1 | 552 | |
| | | K514A, | binding↓ (A) in b2 | | | | | | | | |
| | | K516A | | | | | | | | | |
| 128 | b1b2-Fc | K358E, | single b1b2, heparin | Yes | No | Yes | Unmodified | | 1 | 555 | no binding |
| | | K373E, | binding ↓ in b1b2 | | | | | | | | (60%), |
| | | R513E, | | | | | | | | | binding |
| | | K514E, | | | | | | | | | (40%) |
| | | K516E | | | | | | | | | |
| 129 | b1b2-Fc | Y297A, | single b1b2, no VEGF | Yes | No | Yes | Removed | | 1 | 555 | no binding |
| | | S345A, | binding, heparin binding ↓ | | | | | | | | (60%), |
| | | Y353A, | in b1b2 | | | | | | | | binding |
| | | K358E, | | | | | | | | | (40%) |
| | | K373E, | | | | | | | | | |
| | | R513E, | | | | | | | | | |
| | | K514E, | | | | | | | | | |
| | | K516E | | | | | | | | | |
| 130 | Fc-b1b2 | WT | b1b2 in C-term, single b1b2 | Yes | No | No | Unmodified | | 1 | 552 | |
| 131 | Fc-b1b2 | Y297A, | b1b2 in C-term, single | Yes | No | Yes | Unmodified | | 1 | 552 | |
| | | S345A, | b1b2, heparin binding↓ (E) | | | | | | | | |
| | | Y353A, | in b2 | | | | | | | | |
| | | R513E, | | | | | | | | | |
| | | K514E, | | | | | | | | | |
| | | K516E | | | | | | | | | |
| 132 | Fc-b1b2 | Y297A, | b1b2 in C-term, single | Yes | No | Yes | Unmodified | | 1 | 552 | |
| | | S345A, | b1b2, heparin binding↓ (A) | | | | | | | | |
| | | Y353A, | in b2 | | | | | | | | |
| | | R513A, | | | | | | | | | |
| | | K514A, | | | | | | | | | |
| | | K516A | | | | | | | | | |
| 133 | b1-Fc-b1 | K373E, | single b1 in N-term and C- | Yes | No | Yes | Unmodified | 1 | | 580 | |
| | | | term, heparin binding (E) ↓ | | | | | | | | |
| | | | in b1 | | | | | | | | |
| 134 | b1b1-Fc-b | K373E, | double b1 in N-term and | Yes | No | Yes | Unmodified | 2 | | 750 | |
| | | | single b1 in C-term, heparin | | | | | | | | |
| | | | binding (E) ↓ in b1 | | | | | | | | |
| 135 | b1b1-Fc | WT | single b1 in N-term and C- | Yes | No | No | Unmodified | 1 | | 576 | binding to |
| | | | term | | | | | | | | heparin |
| 136 | b1b1b1-Fc | WT | single b1 in N-term and C- | Yes | No | No | Unmodified | 1 | | 746 | binding to |
| | | | term | | | | | | | | heparin |
| 137 | b1-Fc-b1 | WT | single b1 in N-term and C- | Yes | No | No | Unmodified | 1 | | 580 | binding to |
| | | | term | | | | | | | | heparin |
| 138 | b1b2-b1b2-Fc | WT | double b1b2 | Yes | No | No | Unmodified | | 2 | 874 | binding to |
| | | | | | | | | | | | heparin |
| 139 | b1b2-b1b2-Fc | E319A | double b1b2 (VEGF | Yes | No | No | Increased | | 2 | 874 | |
| | | | binding ↑) | | | | | | | | |
| 140 | b1b2-b1b2-Fc | K351A | double b1b2 (VEGF | Yes | No | No | Decreased | | 2 | 874 | |
| | | | binding ↓) | | | | | | | | |
| 141 | b1b2-b1b2-Fc | Y297A, | double b1b2, no VEGF | Yes | No | No | Removed | | 2 | 874 | |
| | | S345A, | binding | | | | | | | | |
| | | Y353A | | | | | | | | | |
| 142 | b1b2-Fc-b1b2 | WT | single b1b2 in N-term and | Yes | No | No | Unmodified | | 1 | 878 | |
| | | | C-term | | | | | | | | |
| 143 | b1b2-Fc-b1b2 | E319A | double b1 in N-term and | Yes | No | No | Increased | 2 | | 878 | |
| | | | single b1 in C-term, | | | | | | | | |
| | | | increased VEGF binding | | | | | | | | |
| 144 | b1-Fc | WT | single b1 | No | Yes | No | Unmodified | 1 | | 407 | |
| 145 | b1b1-Fc | WT | double b1 | No | Yes | No | Unmodified | 2 | | 578 | |
| 146 | b1b1b1-Fc | WT | triple b1 | No | Yes | No | Unmodified | 3 | | 749 | |
| 147 | b1-Fc | K373E, | single b1, heparin binding ↓ | No | Yes | Yes | Unmodified | 1 | | 407 | |
| | | | (E) in b1 | | | | | | | | |
| 148 | b1b1-Fc | K373E, | double b1, heparin binding | No | Yes | Yes | Unmodified | 2 | | 578 | |
| | | | ↓ (E) in b1 | | | | | | | | |
| 149 | b1b1b1-Fc | K373E, | triple b1, heparin binding ↓ | No | Yes | Yes | Unmodified | 3 | | 749 | |
| | | | (E) in b1 | | | | | | | | |
| 150 | b1-Fc | Y297A, | single b1, No VEGF | No | Yes | Yes | Decreased | 1 | | 407 | |
| | | S345A, | binding, heparin binding ↓ | | | | | | | | |
| | | Y353A, | (E) in b1 | | | | | | | | |
| | | K373E | | | | | | | | | |
| 151 | b1b1b1-Fc | Y297A, | triple b1, No VEGF | No | Yes | Yes | Decreased | 3 | | 749 | |
| | | S345A, | binding, heparin binding ↓ | | | | | | | | |
| | | Y353A, | (E) in b1 | | | | | | | | |
| | | K373E | | | | | | | | | |
| 152 | b1-Fc | K358E, | single b1, heparin binding ↓ | No | Yes | Yes | Unmodified | 1 | | 407 | |
| | | K373E | (E) in b1 (two sites) | | | | | | | | |
| 153 | b1b1b1-Fc | K358E, | triple b1, heparin binding ↓ | No | Yes | Yes | Unmodified | 3 | | 749 | |
| | | K373E | (E) in b1 (two sites) | | | | | | | | |
| 154 | b162-Fc | WT | single b1b2 | No | Yes | No | Unmodified | | 1 | 559 | binding to |
| | | | | | | | | | | | heparin |
| 155 | b1b2-Fc | R513A, | single b1b2, heparin | No | Yes | Yes | Unmodified | | 1 | 559 | |
| | | K514A, | binding ↓ (A) in b2 | | | | | | | | |
| | | K516A | | | | | | | | | |
| 156 | b1b2-Fc | R513E, | single b1b2, heparin | No | Yes | Yes | Unmodified | | 1 | 559 | |
| | | K514E, | binding ↓ (E) in b2 | | | | | | | | |
| | | K516E | | | | | | | | | |
| 157 | Fc-b1b2 | WT | single b1b2 in C-term | No | Yes | No | Unmodified | | 1 | 559 | |
| 158 | Fc-b1b2 | Y297A, | single b1b2 in C-term, | No | Yes | Yes | Unmodified | | 1 | 555 | |
| | | S345A, | heparin binding ↓ (A) in b2 | | | | | | | | |
| | | Y353A, | | | | | | | | | |
| | | R513E, | | | | | | | | | |
| | | K514E, | | | | | | | | | |
| | | K516E | | | | | | | | | |
| 159 | Fc-b1b2 | Y297A, | single b1b2 in C-term, | No | Yes | Yes | Unmodified | | 1 | 555 | |
| | | S345A, | heparin binding ↓ (E) in b2 | | | | | | | | |
| | | Y353A, | | | | | | | | | |
| | | R513A, | | | | | | | | | |
| | | K514A, | | | | | | | | | |
| | | K516A | | | | | | | | | |
| 160 | b1-Fc-b1 | WT | single b1 in N-term and C- | No | Yes | No | Unmodified | 1 | | 582 | |
| | | | term | | | | | | | | |
| 161 | b1b1-Fc-b1 | WT | double b1 in N-term and | No | Yes | No | Unmodified | 3 | | 753 | |
| | | | single b1 in C-term | | | | | | | | |
| 162 | b1-Fc-b1 | K373E, | single b1 in N-term and C- | No | Yes | Yes | Unmodified | 1 | | 582 | |
| | | | term, heparin binding (E) ↓ | | | | | | | | |
| | | | in b1 | | | | | | | | |
| 163 | b1b1-Fc-b1 | K373E, | double b1 in N-term and | No | Yes | Yes | Unmodified | 3 | | 753 | |
| | | | single b1 in C-term, heparin | | | | | | | | |
| | | | binding (E) ↓ in b1 | | | | | | | | |
| 164 | N1(b1)/ | WT | N1(b1), N2(b2) | Yes | Yes | No | Unmodified | | 1 | 569 | |
| | N2(b2)-Fc | | | | | | | | | | |
| 165 | N2(b1)/ | WT | N2(b1), N1(b2) | Yes | Yes | No | Unmodified | | 1 | 564 | |
| | N1(b2)-Fc | | | | | | | | | | |
| 166 | N1(b1)/ | Y297A, | N1(b1), N2(b2), no binding | Yes | Yes | No | Removed | | 1 | 569 | |
| | N2(b2)-Fc | S345A, | VEGF | | | | | | | | |
| | | Y353A | | | | | | | | | |
| 202 | N1(a1a2b1b2c)- | | ECD domain of N1 | Yes | No | No | Unmodified | 1 | | 1057 | |
| | Fc | | | | | | | | | | |
| 167 | N1(a1a2b1b2)- | | a1a2 and b1b2 domain of | Yes | No | No | Unmodified | | 1 | 788 | |
| | Fc | | N1 | | | | | | | | |
| 168 | N1(a2b1)-Fc | | a2 and b1 domain of N1 | Yes | No | No | Unmodified | 1 | | 565 | |
| 191 | b1b2-Fc | WT | single b1 | Yes | No | No | Unmodified | 1 | | 555 | |
| 192 | b1b2-Fc- | | single b1 in N-term and | Yes | No | No | Unmodified | | 1 | 601 | |
| | ACE2-1 | | alpha domain of ACE2 in | | | | | | | | |
| | | | C-term | | | | | | | | |
| 193 | b1b2-Fc | Y297A, | single b1b2 in N-term , no | Yes | No | No | Removed | | 1 | 555 | |
| | | S345A, | VEGF binding | | | | | | | | |
| | | Y353A | | | | | | | | | |
| 194 | b1b2-Fc | WT | single b1b2-Fc | No | Yes | No | Unmodified | | 1 | 564 | |
| 195 | b1-Fc | WT | single b1 | Yes | No | No | Unmodified | 1 | | 406 | |
| 196 | b1-b1-Fc | K373E, | double b1 in N-term, | Yes | No | Yes | Unmodified | 2 | | 584 | |
| | | | heparin binding ↓(E) in b1 | | | | | | | | |
| 197 | b1-b1-b1-Fc | K373E, | triple b1 in N-term, heparin | Yes | No | Yes | Unmodified | 3 | | 758 | |
| | | | binding ↓(E) in b1 | | | | | | | | |
| 198 | b1-Fc-b1 | K373E, | single b1 in N-term and | Yes | No | Yes | Unmodified | 2 | | 588 | |
| | | | single b1 in C-term, | | | | | | | | |
| | | | heparin binding ↓(E) in b1 | | | | | | | | |
| 199 | b1-b1-Fc | K358E | double b1, heparin binding | No | Yes | Yes | Unmodified | 2 | | 586 | |
| | | | ↓ (E) in b1 | | | | | | | | |
| 200 | b1-b1-b1-Fc | K358E | triple b1, heparin binding ↓ | No | Yes | Yes | Unmodified | 3 | | 761 | |
| | | | (E) in b1 | | | | | | | | |
| 201 | b1-Fc-b1 | K358E | single b1 in N-term and | No | Yes | Yes | Unmodified | 2 | | 590 | |
| | | | single b1 in C-term, heparin | | | | | | | | |
| | | | binding ↓ (E) in b1 | | | | | | | | |
| 203 | b1b2-Fc-ACE2 | WT | single b1b2, IgG2Fc, ACE2 | Yes | No | No | Unmodified | | 1 | 596 | |
| | | | alpha domain | | | | | | | | |
| 204 | b1b2-Fc-ACE2 | K358E, | single b1b2, IgG2Fc, | Yes | No | Yes | Unmodified | | 1 | 596 | |
| | | K373E, | repeated ACE2 alpha | | | | | | | | |
| | | R513E, | domain, heparin binding | | | | | | | | |
| | | K514E, | mutation | | | | | | | | |
| | | K516E | | | | | | | | | |
| 205 | b1b2-Fc-ACE2 | WT | single b1b2, IgG2Fc, | Yes | No | No | Unmodified | | 1 | 647 | |
| | | | repeated ACE2 alpha | | | | | | | | |
| | | | domain | | | | | | | | |
| 206 | Nrp1(b1)/ | WT | b1 of NRP1 and b2 of | Yes | Yes | No | Unmodified | | 1 | 561 | |
| | Nrp2(b2)-Fc | | NRP2 | | | | | | | | |
| 207 | Nrp2(b1)/ | WT | b1 of NRP2 and b2 of | Yes | Yes | No | Unmodified | | 1 | 556 | |
| | Nrp1(b2)-Fc | | NRP1 | | | | | | | | |
| 208 | Nrp1(b1) | Y297A, | b1 of NRP1 and b2 of | Yes | Yes | No | No binding | | 1 | 561 | |
| | Nrp2(b2)-Fc | S345A, | NRP2, No VEGF binding | | | | | | | | |
| | | Y353A | | | | | | | | | |
| 209 | b1b2-Fc | WT | Single b1b2 domain | No | Yes | No | Unmodified | | 1 | 558 | |

The column labeled “Structure” shows the overall design and orientation of motifs comprising a given construct (as described in FIG. 4).
The column labeled “Strategy” shows the corresponding strategy and/or anticipated effect; here, a downward pinging arrow (“↓”) means decreased. “E” means that the amino acid was substituted with a glutamic acid residue. “A” means that the amino acid was substituted to an alanine residue. N1 = NRP1; N2 = NRP2.
The column labeled “Reduced heparin mutation” identifies whether the corresponding construct possess a mutation that reduces heparin binding.
The column labeled “VEGF binding” indicates whether a given construct's VEGF binding has been increased, decreased, or is unmodified.
The column labeled “b1 No.” and “b1b2 No.” indicates the b1 and b1b2 subunits used, respectively.
The column labeled “Heparin affinity column” shows the results of heparin binding.

[0529] Results of Heparin Binding

[0530] The results of heparin affinity were summarized in the table below. Some of the constructs tested did not bind to heparin column. For example, SEQ ID NOs: 113, 128, 129, 114, 115, 116 and 133 showed no heparin binding. Among the foregoing constructs, SEQ ID NO: 113 has wild type of b1 domain, whereas the other SEQ ID NOs: 128, 129, 114, 115, 116, and 133 include at least one mutation to the putative heparin binding sites.

[0531] Except SEQ ID NO: 133, all of the constructs that have a wild type b (domain only, or a b1b2 domain, were shown to bind to heparin. The construct molecules SEQ ID NOs: 122, 124 and 125, which have a wild type b1b2 domain, showed stronger heparin binding than the constructs having only a b1 domain. And, a single b1 domain did not result in heparin binding, however, increasing the number of b1 domains resulted in heparin binding: thus indicating that increased avidity of b1 domain could interact with heparin.

TABLE 23
Heparin affinity results of construct molecules. Here, the letter in the column entitled
“Heparin binding affinity profile” corresponds to the letters in FIG. 41.

| | Heparin | | | | Heparin HP |
|---|---|---|---|---|---|
| | binding | | VEGF | Heparin | elution |
| | affinity | | binding | binding site | conductivity |
| SEQ ID NO. | profile | Structure | site | mutation | (mS/cm) |
| 113 | A | N1(b1)-Fc | WT | WT | No binding |
| 121 | B | N1(b1b1)- | WT | WT | 30 |
| | | N1(b1b1)-Fc | | | |
| 122 | C | N1(b1b2)-Fc | WT | WT | 49 |
| 125 | N | N1(b1b2)-Fc | Y297A, | WT | 49 |
| | | | S345A, | | |
| | | | Y353A | | |
| 124 | O | N1(b1b2)-Fc | K351A | WT | 49 |
| 128 | G | N1(b1b2)-Fc | WT | K358E, K373E, | No binding |
| | | | | R513E, K514E, | (60%), 16 |
| | | | | K516E | (40%) |
| 129 | L | N1(b1b2)-Fc | Y297A, | K358E, K373E, | No binding |
| | | | S345A, | R513E, K514E, | (60%), 16 |
| | | | Y353A | K516E | (40%) |
| 154 | M | N2(b1b2)-Fc | WT | WT | 49 |
| 135 | D | N1(b1)-N1(b1)-Fc | WT | WT | 16 |
| 136 | E | N1(b1)-N1(b1)- | WT | WT | 16 |
| | | N1(b1)-Fc | | | |
| 137 | F | N1(b1)-Fc-N1(b1) | WT | WT | 18 |
| 114 | H | N1(b1)-Fc | WT | K373E | No binding |
| 115 | I | N1(b1)-N1(b1)-Fc | WT | K373E | No binding |
| 116 | J | N1(b1)-N1(b1)- | WT | K373E | No binding |
| | | N1(b1)-Fc | | | |
| 133 | K | N1(b1)-Fc-N1(b1) | WT | K373E | No binding |

### Example 14. CendR Decoy Sequences

[0532] Overview

[0533] Receptor binding domain CendR motifs were evaluated in order to display and characterize neuropilin-1 b1-domain-antibody-fusion constructs binding to CendR motifs, and the binding of b1 to viral proteins and/or CendR peptides.

[0534] The constructs tested in the present example comprised either one or multiple recognition binding domain targeting neuropilin-1 b1 domains in tandem expressed as recombinant fusion molecules on the n-terminus of the human IgG Fc. FIG. 42.

[0535] Without wishing to be bound by theory, it is hypothesized that the constructs of the present invention bind the CendR motifs of glycoproteins of SARS-CoV-2, Respiratory Syncytial Virus (RSV), and other viral pathogens through neuropilin-1 b1 domains. And, Viral Recognition Binding Domain (RBD) targeting is primarily mediated by binding of neuropilin b1 domain to the RBD cleaved CendR motif (e.g., RXXROH) of viral constructs expressed on spike proteins on virus particle membranes. Neuropilin-1 is a cell surface receptor involved in multiple developmental process including axon guidance, angiogenesis, and heterophilic cell adhesion. Neuropilin-1 b1 domain forms part of the tandem coagulation factor domains along with the b2 domain and both domains belong to the domain family referred to as F5/8 type C, or the discoidin domain family. Neuropiln-1 b1 domain has been identified as the primary driver of binding to the S1 domain of virus spike proteins and may aid in viral infectivity. The recombinant fusion of the RBD binding b1 domain with human IgG Fc activates the adaptive immune system to engage and prevent infectivity of viral pathogens. Neuropilin-1 b1 domain in conjunction with other neuropilin ectodomains mediates binding of ligands including semaphorins, coagulation factors V and VIII, and VEGF in axon guidance cue and angiogenic factor binding as part of the developmental process and other physiological activities.

[0536] Binding analyses were established using Bio-Layer Interferometry (BLI) on an Octet® Red 96 system (ForteBio). The specific objectives of the present example were as follows: (1) Establish construct molecules binding to RBD CendR motif of virus particles; and (2) Characterize construct molecules binding parameters to RBD CendR motif targets recombinant virus proteins

[0537] Binding of Construct Molecules Recombinant Viral Proteins

[0538] To assess the binding of the construct molecules to viral proteins, BLI binding studies using the Octet red 96 system were conducted. Briefly, constructs were immobilized on Anti-Human Fc Capture (AHC) biosensors and interrogated for binding to recombinant viral proteins that had been commercially sourced. Using BLI technology, the binding to constructs was evaluated across various viruses and both kinetics and binding affinity (equilibrium binding constant, K_{D}) were assessed in the monovalent format. Additionally, CendR peptide sequences from various viruses were immobilized on streptavidin (SA) biosensors These studies were performed to determine whether construct molecules exhibit broad spectrum activity, and with what affinity the construct molecules have for the target proteins and peptide.

[0539] Construct molecules tested are described in the table below.

TABLE 24
Constructs evaluated in CendR studies.

| SEQ ID NO. | Sequence |
|---|---|
| 113 | EDFKCMEALGMESGEIHSDQITASSQYSTNWSAERSRLNYPENGWTPGEDSYREWIQ |
| | VDLGLLRFVTAVGTQGAISKETKKKYYVKTYKIDVSSNGEDWITIKEGNKPVLFQGN |
| | TNPTDVVVAVFPKPLITRFVRIKPATWETGISMRFEVYGCGGGGSGGGGSEPKSCDK |
| | THTCPPCPAPELLGGPSVFLFPPKPKDTLMISRTPEVTCVVVDVSHEDPEVKFNWYV |
| | DGVEVHNAKTKPREEQYNSTYRVVSVLAVLHQDWLNGKEYKCKVSNKALPAPIEKTI |
| | SKAKGQPREPQVYTLPPSRDELTKNQVSLTCLVKGFYPSDIAVAWESNGQPENNYKT |
| | TPPVLDSDGSFFLYSKLTVDKSRWQQGNVFSCSVMHEALHAHYTQKSLSLSPGK |
| 121 | EDFKCMEALGMESGEIHSDQITASSQYSTNWSAERSRLNYPENGWTPGEDSYREWIQ |
| | VDLGLLRFVTAVGTQGAISKETKKKYYVKTYKIDVSSNGEDWITIKEGNKPVLFQGN |
| | TNPTDVVVAVFPKPLITRFVRIKPATWETGISMRFEVYGCKITDYPCMEALGMESGE |
| | IHSDQITASSQYSTNWSAERSRLNYPENGWTPGEDSYREWIQVDLGLLRFVTAVGTQ |
| | GAISKETKKKYYVKTYKIDVSSNGEDWITIKEGNKPVLFQGNTNPTDVVVAVFPKPL |
| | ITRFVRIKPATWETGISMRFEVYGCGGGGSGGGGSCMEALGMESGEIHSDQITASSQ |
| | YSTNWSAERSRLNYPENGWTPGEDSYREWIQVDLGLLRFVTAVGTQGAISKETKKKY |
| | YVKTYKIDVSSNGEDWITIKEGNKPVLFQGNTNPTDVVVAVFPKPLITRFVRIKPAT |
| | WETGISMRFEVYGCKITDYPCMEALGMESGEIHSDQITASSQYSTNWSAERSRLNYP |
| | ENGWTPGEDSYREWIQVDLGLLRFVTAVGTQGAISKETKKKYYVKTYKIDVSSNGED |
| | WITIKEGNKPVLFQGNTNPTDVVVAVFPKPLITRFVRIKPATWETGISMRFEVYGCG |
| | GGGSGGGGSEPKSCDKTHTCPPCPAPELLGGPSVFLFPPKPKDTLMISRTPEVTCVV |
| | VDVSHEDPEVKFNWYVDGVEVHNAKTKPREEQYNSTYRVVSVLAVLHQDWLNGKEYK |
| | CKVSNKALPAPIEKTISKAKGQPREPQVYTLPPSRDELTKNQVSLTCLVKGFYPSDI |
| | AVAWESNGQPENNYKTTPPVLDSDGSFFLYSKLTVDKSRWQQGNVFSCSVMHEALHA |
| | HYTQKSLSLSPGK |
| 122 | EDFKCMEALGMESGEIHSDQITASSQYSTNWSAERSRLNYPENGWTPGEDSYREWIQ |
| | VDLGLLRFVTAVGTQGAISKETKKKYYVKTYKIDVSSNGEDWITIKEGNKPVLFQGN |
| | TNPTDVVVAVFPKPLITRFVRIKPATWETGISMRFEVYGCKITDYPCSGMLGMVSGL |
| | ISDSQITSSNQGDRNWMPENIRLVTSRSGWALPPAPHSYINEWLQIDLGEEKIVRGI |
| | IIQGGKHRENKVFMRKFKIGYSNNGSDWKMIMDDSKRKAKSFEGNNNYDTPELRTFP |
| | ALSTRFIRIYPERATHGGLGLRMELLGCGGGGSGGGGSEPKSCDKTHTCPPCPAPEL |
| | LGGPSVFLFPPKPKDTLMISRTPEVTCVVVDVSHEDPEVKFNWYVDGVEVHNAKTKP |
| | REEQYNSTYRVVSVLTVLHQDWLNGKEYKCKVSNKALPAPIEKTISKAKGQPREPQV |
| | YTLPPSRDELTKNQVSLTCLVKGFYPSDIAVEWESNGQPENNYKTTPPVLDSDGSFF |
| | LYSKLTVDKSRWQQGNVFSCSVMHEALHNHYTQKSLSLSPGK |
| 154 | ENFQCNVPLGMESGRIANEQISASSTYSDGRWTPQQSRLHGDDNGWTPNLDSNKEYL |
| | QVDLRFLTMLTAIATQGAISRETQNGYYVKSYKLEVSTNGEDWMVYRHGKNHKVFQA |
| | NNDATEVVLNKLHAPLLTRFVRIRPQTWHSGIALRLELFGCRVTDAPCSNMLGMLSG |
| | LIADSQISASSTQEYLWSPSAARLVSSRSGWFPRIPQAQPGEEWLQVDLGTPKTVKG |
| | VIIQGARGGDSITAVEARAFVRKFKVSYSLNGKDWEYIQDPRTQQPKLFEGNMHYDT |
| | PDIRRFDPIPAQYVRVYPERWSPAGIGMRLEVLGCGGGGSGGGGSEPKSCDKTHTCP |
| | PCPAPELLGGPSVFLFPPKPKDTLMISRTPEVTCVVVDVSHEDPEVKFNWYVDGVEV |
| | HNAKTKPREEQYNSTYRVVSVLTVLHQDWLNGKEYKCKVSNKALPAPIEKTISKAKG |
| | QPREPQVYTLPPSRDELTKNQVSLTCLVKGFYPSDIAVEWESNGQPENNYKTTPPVL |
| | DSDGSFFLYSKLTVDKSRWQQGNVFSCSVMHEALHNHYTQKSLSLSPGK |
| 193 | EDFKCMEALGMESGEIHSDQITASSQASTNWSAERSRLNYPENGWTPGEDSYREWIQ |
| | VDLGLLRFVTAVGTQGAIAKETKKKAYVKTYKIDVSSNGEDWITIKEGNKPVLFQGN |
| | TNPTDVVVAVFPKPLITRFVRIKPATWETGISMRFEVYGCKITDYPCSGMLGMVSGL |
| | ISDSQITSSNQGDRNWMPENIRLVTSRSGWALPPAPHSYINEWLQIDLGEEKIVRGI |
| | IIQGGKHRENKVFMRKFKIGYSNNGSDWKMIMDDSKRKAKSFEGNNNYDTPELRTFP |
| | ALSTRFIRIYPERATHGGLGLRMELLGCGGGGSGGGGSEPKSCDKTHTCPPCPAPEL |
| | LGGPSVFLFPPKPKDTLMISRTPEVTCVVVDVSHEDPEVKFNWYVDGVEVHNAKTKP |
| | REEQYNSTYRVVSVLTVLHQDWLNGKEYKCKVSNKALPAPIEKTISKAKGQPREPQV |
| | YTLPPSRDELTKNQVSLTCLVKGFYPSDIAVEWESNGQPENNYKTTPPVLDSDGSFF |
| | LYSKLTVDKSRWQQGNVFSCSVMHEALHNHYTQKSLSLSPGK |
| 194 | ENFQCNVPLGMESGRIANEQISASSTYSDGRWTPQQSRLHGDDNGWTPNLDSNKEYL |
| | QVDLRFLTMLTAIATQGAISRETQNGYYVKSYKLEVSTNGEDWMVYRHGKNHKVFQA |
| | NNDATEVVLNKLHAPLLTRFVRIRPQTWHSGIALRLELFGCRVTDAPCSNMLGMLSG |
| | LIADSQISASSTQEYLWSPSAARLVSSRSGWFPRIPQAQPGEEWLQVDLGTPKTVKG |
| | VIIQGARGGDSITAVEARAFVRKFKVSYSLNGKDWEYIQDPRTQQPKLFEGNMHYDT |
| | PDIRRFDPIPAQYVRVYPERWSPAGIGMRLEVLGCGAPAPAGAPAPAEPKSCDKTHT |
| | CPPCPAPELLGGPSVFLFPPKPKDTLMISRTPEVTCVVVDVSHEDPEVKFNWYVDGV |
| | EVHNAKTKPREEQYNSTYRVVSVLTVLHQDWLNGKEYKCKVSNKALPAPIEKTISKA |
| | KGQPREPQVYTLPPSRDELTKNQVSLTCLVKGFYPSDIAVEWESNGQPENNYKTTPP |
| | VLDSDGSFFLYSKLTVDKSRWQQGNVFSCSVMHEALHNHYTQKSLSLSPGK |
| 195 | EDFKCMEALGMESGEIHSDQITASSQYSTNWSAERSRLNYPENGWTPGEDSYREWIQ |
| | VDLGLLRFVTAVGTQGAISKETKKKYYVKTYKIDVSSNGEDWITIKEGNKPVLFQGN |
| | TNPTDVVVAVFPKPLITRFVRIKPATWETGISMRFEVYGCGGGGSGGGGSGGGGSGG |
| | GGSEPKSCDKTHTCPPCPAPELLGGPSVFLFPPKPKDTLMISRTPEVTCVVVDVSHE |
| | DPEVKFNWYVDGVEVHNAKTKPREEQYNSTYRVVSVLTVLHQDWLNGKEYKCKVSNK |
| | ALPAPIEKTISKAKGQPREPQVYTLPPSRDELTKNQVSLTCLVKGFYPSDIAVEWES |
| | NGQPENNYKTTPPVLDSDGSFFLYSKLTVDKSRWQQGNVFSCSVMHEALHNHYTQKS |
| | LSLSPGK |
| 135 | EDFKCMEALGMESGEIHSDQITASSQYSTNWSAERSRLNYPENGWTPGEDSYREWIQ |
| | VDLGLLRFVTAVGTQGAISKETKKKYYVKTYKIDVSSNGEDWITIKEGNKPVLFQGN |
| | TNPTDVVVAVFPKPLITRFVRIKPATWETGISMRFEVYGCGGGGSGGGGSGGGGSGG |
| | GGSCMEALGMESGEIHSDQITASSQYSTNWSAERSRLNYPENGWTPGEDSYREWIQV |
| | DLGLLRFVTAVGTQGAISKETKKKYYVKTYKIDVSSNGEDWITIKEGNKPVLFQGNT |
| | NPTDVVVAVFPKPLITRFVRIKPATWETGISMRFEVYGCGGGGSGGGGSGGGGSGGG |
| | GSEPKSCDKTHTCPPCPAPELLGGPSVFLFPPKPKDTLMISRTPEVTCVVVDVSHED |
| | PEVKFNWYVDGVEVHNAKTKPREEQYNSTYRVVSVLTVLHQDWLNGKEYKCKVSNKA |
| | LPAPIEKTISKAKGQPREPQVYTLPPSRDELTKNQVSLTCLVKGFYPSDIAVEWESN |
| | GQPENNYKTTPPVLDSDGSFFLYSKLTVDKSRWQQGNVFSCSVMHEALHNHYTQKSL |
| | SLSPGK |
| 136 | EDFKCMEALGMESGEIHSDQITASSQYSTNWSAERSRLNYPENGWTPGEDSYREWIQ |
| | VDLGLLRFVTAVGTQGAISKETKKKYYVKTYKIDVSSNGEDWITIKEGNKPVLFQGN |
| | TNPTDVVVAVFPKPLITRFVRIKPATWETGISMRFEVYGCGGGGSGGGGSGGGGSGG |
| | GGSCMEALGMESGEIHSDQITASSQYSTNWSAERSRLNYPENGWTPGEDSYREWIQV |
| | DLGLLRFVTAVGTQGAISKETKKKYYVKTYKIDVSSNGEDWITIKEGNKPVLFQGNT |
| | NPTDVVVAVFPKPLITRFVRIKPATWETGISMRFEVYGCGGGGSGGGGSGGGGSGGG |
| | GSCMEALGMESGEIHSDQITASSQYSTNWSAERSRLNYPENGWTPGEDSYREWIQVD |
| | LGLLRFVTAVGTQGAISKETKKKYYVKTYKIDVSSNGEDWITIKEGNKPVLFQGNTN |
| | PTDVVVAVFPKPLITRFVRIKPATWETGISMRFEVYGCGGGGSGGGGSGGGGSGGGG |
| | SEPKSCDKTHTCPPCPAPELLGGPSVFLFPPKPKDTLMISRTPEVTCVVVDVSHEDP |
| | EVKFNWYVDGVEVHNAKTKPREEQYNSTYRVVSVLTVLHQDWLNGKEYKCKVSNKAL |
| | PAPIEKTISKAKGQPREPQVYTLPPSRDELTKNQVSLTCLVKGFYPSDIAVEWESNG |
| | QPENNYKTTPPVLDSDGSFFLYSKLTVDKSRWQQGNVFSCSVMHEALHNHYTQKSLS |
| | LSPGK |
| 137 | EDFKCMEALGMESGEIHSDQITASSQYSTNWSAERSRLNYPENGWTPGEDSYREWIQ |
| | VDLGLLRFVTAVGTQGAISKETKKKYYVKTYKIDVSSNGEDWITIKEGNKPVLFQGN |
| | TNPTDVVVAVFPKPLITRFVRIKPATWETGISMRFEVYGCGGGGSGGGGSGGGGSGG |
| | GGSEPKSCDKTHTCPPCPAPELLGGPSVFLFPPKPKDTLMISRTPEVTCVVVDVSHE |
| | DPEVKFNWYVDGVEVHNAKTKPREEQYNSTYRVVSVLTVLHQDWLNGKEYKCKVSNK |
| | ALPAPIEKTISKAKGQPREPQVYTLPPSRDELTKNQVSLTCLVKGFYPSDIAVEWES |
| | NGQPENNYKTTPPVLDSDGSFFLYSKLTVDKSRWQQGNVFSCSVMHEALHNHYTQKS |
| | LSLSPGKGGGGSGGGGSGGGGSGGGGSCMEALGMESGEIHSDQITASSQYSTNWSAE |
| | RSRLNYPENGWTPGEDSYREWIQVDLGLLRFVTAVGTQGAISKETKKKYYVKTYKID |
| | VSSNGEDWITIKEGNKPVLFQGNTNPTDVVVAVFPKPLITRFVRIKPATWETGISMR |
| | FEVYGCEVEA |
| 114 | EDFKCMEALGMESGEIHSDQITASSQYSTNWSAERSRLNYPENGWTPGEDSYREWIQ |
| | VDLGLLRFVTAVGTQGAISKETKKKYYVKTYKIDVSSNGEDWITIEEGNKPVLFQGN |
| | TNPTDVVVAVFPKPLITRFVRIKPATWETGISMRFEVYGCGGGGSGGGGSGGGGSGG |
| | GGSEPKSCDKTHTCPPCPAPELLGGPSVFLFPPKPKDTLMISRTPEVTCVVVDVSHE |
| | DPEVKFNWYVDGVEVHNAKTKPREEQYNSTYRVVSVLTVLHQDWLNGKEYKCKVSNK |
| | ALPAPIEKTISKAKGQPREPQVYTLPPSRDELTKNQVSLTCLVKGFYPSDIAVEWES |
| | NGQPENNYKTTPPVLDSDGSFFLYSKLTVDKSRWQQGNVFSCSVMHEALHNHYTQKS |
| | LSLSPGK |
| 115 | EDFKCMEALGMESGEIHSDQITASSQYSTNWSAERSRLNYPENGWTPGEDSYREWIQ |
| | VDLGLLRFVTAVGTQGAISKETKKKYYVKTYKIDVSSNGEDWITIEEGNKPVLFQGN |
| | TNPTDVVVAVFPKPLITRFVRIKPATWETGISMRFEVYGCGGGGSGGGGSGGGGSGG |
| | GGSCMEALGMESGEIHSDQITASSQYSTNWSAERSRLNYPENGWTPGEDSYREWIQV |
| | DLGLLRFVTAVGTQGAISKETKKKYYVKTYKIDVSSNGEDWITIEEGNKPVLFQGNT |
| | NPTDVVVAVFPKPLITRFVRIKPATWETGISMRFEVYGCGGGGSGGGGSGGGGSGGG |
| | GSEPKSCDKTHTCPPCPAPELLGGPSVFLFPPKPKDTLMISRTPEVTCVVVDVSHED |
| | PEVKFNWYVDGVEVHNAKTKPREEQYNSTYRVVSVLTVLHQDWLNGKEYKCKVSNKA |
| | LPAPIEKTISKAKGQPREPQVYTLPPSRDELTKNQVSLTCLVKGFYPSDIAVEWESN |
| | GQPENNYKTTPPVLDSDGSFFLYSKLTVDKSRWQQGNVFSCSVMHEALHNHYTQKSL |
| | SLSPGK |
| 116 | EDFKCMEALGMESGEIHSDQITASSQYSTNWSAERSRLNYPENGWTPGEDSYREWIQ |
| | VDLGLLRFVTAVGTQGAISKETKKKYYVKTYKIDVSSNGEDWITIEEGNKPVLFQGN |
| | TNPTDVVVAVFPKPLITRFVRIKPATWETGISMRFEVYGCGGGGSGGGGSGGGGSGG |
| | GGSCMEALGMESGEIHSDQITASSQYSTNWSAERSRLNYPENGWTPGEDSYREWIQV |
| | DLGLLRFVTAVGTQGAISKETKKKYYVKTYKIDVSSNGEDWITIEEGNKPVLFQGNT |
| | NPTDVVVAVFPKPLITRFVRIKPATWETGISMRFEVYGCGGGGSGGGGSGGGGSGGG |
| | GSCMEALGMESGEIHSDQITASSQYSTNWSAERSRLNYPENGWTPGEDSYREWIQVD |
| | LGLLRFVTAVGTQGAISKETKKKYYVKTYKIDVSSNGEDWITIEEGNKPVLFQGNTN |
| | PTDVVVAVFPKPLITRFVRIKPATWETGISMRFEVYGCGGGGSGGGGSGGGGSGGGG |
| | SEPKSCDKTHTCPPCPAPELLGGPSVFLFPPKPKDTLMISRTPEVTCVVVDVSHEDP |
| | EVKFNWYVDGVEVHNAKTKPREEQYNSTYRVVSVLTVLHQDWLNGKEYKCKVSNKAL |
| | PAPIEKTISKAKGQPREPQVYTLPPSRDELTKNQVSLTCLVKGFYPSDIAVEWESNG |
| | QPENNYKTTPPVLDSDGSFFLYSKLTVDKSRWQQGNVFSCSVMHEALHNHYTQKSLS |
| | LSPGK |
| 133 | EDFKCMEALGMESGEIHSDQITASSQYSTNWSAERSRLNYPENGWTPGEDSYREWIQ |
| | VDLGLLRFVTAVGTQGAISKETKKKYYVKTYKIDVSSNGEDWITIEEGNKPVLFQGN |
| | TNPTDVVVAVFPKPLITRFVRIKPATWETGISMRFEVYGCGGGGSGGGGSGGGGSGG |
| | GGSEPKSCDKTHTCPPCPAPELLGGPSVFLFPPKPKDTLMISRTPEVTCVVVDVSHE |
| | DPEVKFNWYVDGVEVHNAKTKPREEQYNSTYRVVSVLTVLHQDWLNGKEYKCKVSNK |
| | ALPAPIEKTISKAKGQPREPQVYTLPPSRDELTKNQVSLTCLVKGFYPSDIAVEWES |
| | NGQPENNYKTTPPVLDSDGSFFLYSKLTVDKSRWQQGNVFSCSVMHEALHNHYTQKS |
| | LSLSPGKGGGGSGGGGSGGGGSGGGGSCMEALGMESGEIHSDQITASSQYSTNWSAE |
| | RSRLNYPENGWTPGEDSYREWIQVDLGLLRFVTAVGTQGAISKETKKKYYVKTYKID |
| | VSSNGEDWITIEEGNKPVLFQGNTNPTDVVVAVFPKPLITRFVRIKPATWETGISMR |
| | FEVYGCEVEA |
| 148 | ENFQCNVPLGMESGRIANEQISASSTYSDGRWTPQQSRLHGDDNGWTPNLDSNKEYL |
| | QVDLRFLTMLTAIATQGAISRETQNGYYVKSYKLEVSTNGEDWMVYEHGKNHKVFQA |
| | NNDATEVVLNKLHAPLLTRFVRIRPQTWHSGIALRLELFGCGGGGSGGGGSGGGGSG |
| | GGGSCNVPLGMESGRIANEQISASSTYSDGRWTPQQSRLHGDDNGWTPNLDSNKEYL |
| | QVDLRFLTMLTAIATQGAISRETQNGYYVKSYKLEVSTNGEDWMVYEHGKNHKVFQA |
| | NNDATEVVLNKLHAPLLTRFVRIRPQTWHSGIALRLELFGCGGGGSGGGGSGGGGSG |
| | GGGSEPKSCDKTHTCPPCPAPELLGGPSVFLFPPKPKDTLMISRTPEVTCVVVDVSH |
| | EDPEVKFNWYVDGVEVHNAKTKPREEQYNSTYRVVSVLTVLHQDWLNGKEYKCKVSN |
| | KALPAPIEKTISKAKGQPREPQVYTLPPSRDELTKNQVSLTCLVKGFYPSDIAVEWE |
| | SNGQPENNYKTTPPVLDSDGSFFLYSKLTVDKSRWQQGNVFSCSVMHEALHNHYTQK |
| | SLSLSPGK |
| 149 | ENFQCNVPLGMESGRIANEQISASSTYSDGRWTPQQSRLHGDDNGWTPNLDSNKEYL |
| | QVDLRFLTMLTAIATQGAISRETQNGYYVKSYKLEVSTNGEDWMVYEHGKNHKVFQA |
| | NNDATEVVLNKLHAPLLTRFVRIRPQTWHSGIALRLELFGCGGGGSGGGGSGGGGSG |
| | GGGSCNVPLGMESGRIANEQISASSTYSDGRWTPQQSRLHGDDNGWTPNLDSNKEYL |
| | QVDLRFLTMLTAIATQGAISRETQNGYYVKSYKLEVSTNGEDWMVYEHGKNHKVFQA |
| | NNDATEVVLNKLHAPLLTRFVRIRPQTWHSGIALRLELFGCGGGGSGGGGSGGGGSG |
| | GGGSCNVPLGMESGRIANEQISASSTYSDGRWTPQQSRLHGDDNGWTPNLDSNKEYL |
| | QVDLRFLTMLTAIATQGAISRETQNGYYVKSYKLEVSTNGEDWMVYEHGKNHKVFQA |
| | NNDATEVVLNKLHAPLLTRFVRIRPQTWHSGIALRLELFGCGGGGSGGGGSGGGGSG |
| | GGGSEPKSCDKTHTCPPCPAPELLGGPSVFLFPPKPKDTLMISRTPEVTCVVVDVSH |
| | EDPEVKFNWYVDGVEVHNAKTKPREEQYNSTYRVVSVLTVLHQDWLNGKEYKCKVSN |
| | KALPAPIEKTISKAKGQPREPQVYTLPPSRDELTKNQVSLTCLVKGFYPSDIAVEWE |
| | SNGQPENNYKTTPPVLDSDGSFFLYSKLTVDKSRWQQGNVFSCSVMHEALHNHYTQK |
| | SLSLSPGK |
| 162 | ENFQCNVPLGMESGRIANEQISASSTYSDGRWTPQQSRLHGDDNGWTPNLDSNKEYL |
| | QVDLRFLTMLTAIATQGAISRETQNGYYVKSYKLEVSTNGEDWMVYEHGKNHKVFQA |
| | NNDATEVVLNKLHAPLLTRFVRIRPQTWHSGIALRLELFGCGGGGSGGGGSGGGGSG |
| | GGGSEPKSCDKTHTCPPCPAPELLGGPSVFLFPPKPKDTLMISRTPEVTCVVVDVSH |
| | EDPEVKFNWYVDGVEVHNAKTKPREEQYNSTYRVVSVLTVLHQDWLNGKEYKCKVSN |
| | KALPAPIEKTISKAKGQPREPQVYTLPPSRDELTKNQVSLTCLVKGFYPSDIAVEWE |
| | SNGQPENNYKTTPPVLDSDGSFFLYSKLTVDKSRWQQGNVFSCSVMHEALHNHYTQK |
| | SLSLSPGKGGGGSGGGGSGGGGSGGGGSCNVPLGMESGRIANEQISASSTYSDGRWT |
| | PQQSRLHGDDNGWTPNLDSNKEYLQVDLRFLTMLTAIATQGAISRETQNGYYVKSYK |
| | LEVSTNGEDWMVYEHGKNHKVFQANNDATEVVLNKLHAPLLTRFVRIRPQTWHSGIA |
| | LRLELFGCDWTD |
| 196 | EDFKCMEALGMESGEIHSDQITASSQYSTNWSAERSRLNYPENGWTPGEDSYREWIQ |
| | VDLGLLRFVTAVGTQGAISKETKKKYYVKTYKIDVSSNGEDWITIEEGNKPVLFQGN |
| | TNPTDVVVAVFPKPLITRFVRIKPATWETGISMRFEVYGCGAPAPAGAPAPAGAPAP |
| | AGAPAPACMEALGMESGEIHSDQITASSQYSTNWSAERSRLNYPENGWTPGEDSYRE |
| | WIQVDLGLLRFVTAVGTQGAISKETKKKYYVKTYKIDVSSNGEDWITIEEGNKPVLF |
| | QGNTNPTDVVVAVFPKPLITRFVRIKPATWETGISMRFEVYGCGAPAPAGAPAPAGA |
| | PAPAGAPAPAEPKSCDKTHTCPPCPAPELLGGPSVFLFPPKPKDTLMISRTPEVTCV |
| | VVDVSHEDPEVKFNWYVDGVEVHNAKTKPREEQYNSTYRVVSVLTVLHQDWLNGKEY |
| | KCKVSNKALPAPIEKTISKAKGQPREPQVYTLPPSRDELTKNQVSLTCLVKGFYPSD |
| | IAVEWESNGQPENNYKTTPPVLDSDGSFFLYSKLTVDKSRWQQGNVFSCSVMHEALH |
| | NHYTQKSLSLSPGK |
| 197 | EDFKCMEALGMESGEIHSDQITASSQYSTNWSAERSRLNYPENGWTPGEDSYREWIQ |
| | VDLGLLRFVTAVGTQGAISKETKKKYYVKTYKIDVSSNGEDWITIEEGNKPVLFQGN |
| | TNPTDVVVAVFPKPLITRFVRIKPATWETGISMRFEVYGCGAPAPAGAPAPAGAPAP |
| | AGAPAPACMEALGMESGEIHSDQITASSQYSTNWSAERSRLNYPENGWTPGEDSYRE |
| | WIQVDLGLLRFVTAVGTQGAISKETKKKYYVKTYKIDVSSNGEDWITIEEGNKPVLF |
| | QGNTNPTDVVVAVFPKPLITRFVRIKPATWETGISMRFEVYGCGAPAPAGAPAPAGA |
| | PAPAGAPAPACMEALGMESGEIHSDQITASSQYSTNWSAERSRLNYPENGWTPGEDS |
| | YREWIQVDLGLLRFVTAVGTQGAISKETKKKYYVKTYKIDVSSNGEDWITIEEGNKP |
| | VLFQGNTNPTDVVVAVFPKPLITRFVRIKPATWETGISMRFEVYGCGAPAPAGAPAP |
| | AGAPAPAGAPAPAEPKSCDKTHTCPPCPAPELLGGPSVFLFPPKPKDTLMISRTPEV |
| | TCVVVDVSHEDPEVKFNWYVDGVEVHNAKTKPREEQYNSTYRVVSVLTVLHQDWLNG |
| | KEYKCKVSNKALPAPIEKTISKAKGQPREPQVYTLPPSRDELTKNQVSLTCLVKGFY |
| | PSDIAVEWESNGQPENNYKTTPPVLDSDGSFFLYSKLTVDKSRWQQGNVFSCSVMHE |
| | ALHNHYTQKSLSLSPGK |
| 198 | EDFKCMEALGMESGEIHSDQITASSQYSTNWSAERSRLNYPENGWTPGEDSYREWIQ |
| | VDLGLLRFVTAVGTQGAISKETKKKYYVKTYKIDVSSNGEDWITIEEGNKPVLFQGN |
| | TNPTDVVVAVFPKPLITRFVRIKPATWETGISMRFEVYGCGAPAPAGAPAPAGAPAP |
| | AGAPAPAEPKSCDKTHTCPPCPAPELLGGPSVFLFPPKPKDTLMISRTPEVTCVVVD |
| | VSHEDPEVKFNWYVDGVEVHNAKTKPREEQYNSTYRVVSVLTVLHQDWLNGKEYKCK |
| | VSNKALPAPIEKTISKAKGQPREPQVYTLPPSRDELTKNQVSLTCLVKGFYPSDIAV |
| | EWESNGQPENNYKTTPPVLDSDGSFFLYSKLTVDKSRWQQGNVFSCSVMHEALHNHY |
| | TQKSLSLSPGKGAPAPAGAPAPAGAPAPAGAPAPACMEALGMESGEIHSDQITASSQ |
| | YSTNWSAERSRLNYPENGWTPGEDSYREWIQVDLGLLRFVTAVGTQGAISKETKKKY |
| | YVKTYKIDVSSNGEDWITIEEGNKPVLFQGNTNPTDVVVAVFPKPLITRFVRIKPAT |
| | WETGISMRFEVYGCEVEA |
| 199 | ENFQCNVPLGMESGRIANEQISASSTYSDGRWTPQQSRLHGDDNGWTPNLDSNKEYL |
| | QVDLRFLTMLTAIATQGAISRETQNGYYVKSYKLEVSTNGEDWMVYEHGKNHKVFQA |
| | NNDATEVVLNKLHAPLLTRFVRIRPQTWHSGIALRLELFGCGAPAPAGAPAPAGAPA |
| | PAGAPAPACNVPLGMESGRIANEQISASSTYSDGRWTPQQSRLHGDDNGWTPNLDSN |
| | KEYLQVDLRFLTMLTAIATQGAISRETQNGYYVKSYKLEVSTNGEDWMVYEHGKNHK |
| | VFQANNDATEVVLNKLHAPLLTRFVRIRPQTWHSGIALRLELFGCGAPAPAGAPAPA |
| | GAPAPAGAPAPAEPKSCDKTHTCPPCPAPELLGGPSVFLFPPKPKDTLMISRTPEVT |
| | CVVVDVSHEDPEVKFNWYVDGVEVHNAKTKPREEQYNSTYRVVSVLTVLHQDWLNGK |
| | EYKCKVSNKALPAPIEKTISKAKGQPREPQVYTLPPSRDELTKNQVSLTCLVKGFYP |
| | SDIAVEWESNGQPENNYKTTPPVLDSDGSFFLYSKLTVDKSRWQQGNVFSCSVMHEA |
| | LHNHYTQKSLSLSPGK |
| 200 | ENFQCNVPLGMESGRIANEQISASSTYSDGRWTPQQSRLHGDDNGWTPNLDSNKEYL |
| | QVDLRFLTMLTAIATQGAISRETQNGYYVKSYKLEVSTNGEDWMVYEHGKNHKVFQA |
| | NNDATEVVLNKLHAPLLTRFVRIRPQTWHSGIALRLELFGCGAPAPAGAPAPAGAPA |
| | PAGAPAPACNVPLGMESGRIANEQISASSTYSDGRWTPQQSRLHGDDNGWTPNLDSN |
| | KEYLQVDLRFLTMLTAIATQGAISRETQNGYYVKSYKLEVSTNGEDWMVYEHGKNHK |
| | VFQANNDATEVVLNKLHAPLLTRFVRIRPQTWHSGIALRLELFGCGAPAPAGAPAPA |
| | GAPAPAGAPAPACNVPLGMESGRIANEQISASSTYSDGRWTPQQSRLHGDDNGWTPN |
| | LDSNKEYLQVDLRFLTMLTAIATQGAISRETQNGYYVKSYKLEVSTNGEDWMVYEHG |
| | KNHKVFQANNDATEVVLNKLHAPLLTRFVRIRPQTWHSGIALRLELFGCGAPAPAGA |
| | PAPAGAPAPAGAPAPAEPKSCDKTHTCPPCPAPELLGGPSVFLFPPKPKDTLMISRT |
| | PEVTCVVVDVSHEDPEVKFNWYVDGVEVHNAKTKPREEQYNSTYRVVSVLTVLHQDW |
| | LNGKEYKCKVSNKALPAPIEKTISKAKGQPREPQVYTLPPSRDELTKNQVSLTCLVK |
| | GFYPSDIAVEWESNGQPENNYKTTPPVLDSDGSFFLYSKLTVDKSRWQQGNVFSCSV |
| | MHEALHNHYTQKSLSLSPGK |
| 201 | ENFQCNVPLGMESGRIANEQISASSTYSDGRWTPQQSRLHGDDNGWTPNLDSNKEYL |
| | QVDLRFLTMLTAIATQGAISRETQNGYYVKSYKLEVSTNGEDWMVYEHGKNHKVFQA |
| | NNDATEVVLNKLHAPLLTRFVRIRPQTWHSGIALRLELFGCGAPAPAGAPAPAGAPA |
| | PAGAPAPAEPKSCDKTHTCPPCPAPELLGGPSVFLFPPKPKDTLMISRTPEVTCVVV |
| | DVSHEDPEVKFNWYVDGVEVHNAKTKPREEQYNSTYRVVSVLTVLHQDWLNGKEYKC |
| | KVSNKALPAPIEKTISKAKGQPREPQVYTLPPSRDELTKNQVSLTCLVKGFYPSDIA |
| | VEWESNGQPENNYKTTPPVLDSDGSFFLYSKLTVDKSRWQQGNVFSCSVMHEALHNH |
| | YTQKSLSLSPGKGAPAPAGAPAPAGAPAPAGAPAPACNVPLGMESGRIANEQISASS |
| | TYSDGRWTPQQSRLHGDDNGWTPNLDSNKEYLQVDLRFLTMLTAIATQGAISRETQN |
| | GYYVKSYKLEVSTNGEDWMVYEHGKNHKVFQANNDATEVVLNKLHAPLLTRFVRIRP |
| | QTWHSGIALRLELFGCDWTD |

[0540] Materials

[0541] Materials used in the present example are provided in the table below.

TABLE 25
Materials used in the CendR studies.

| Material | Source | Catalog No. | Lot No. |
|---|---|---|---|
| Recombinant RSV Protein | Antibodies Online | ABIN2006856 | |
| | Sino Biological | 11049-V08B | |
| Recombinant SARS-Cov-2 | Sino Biological | | |
| Protein | | | |
| NHS-Ester biotinylation Kit | ThermoFisher | A39256 | N/A |
| | Scientific | | |
| Anti-hIgG Fc Capture | Sartorius | 18-5060 | N/A |
| (AHC) Biosensors | | | |
| Streptavidin Biosensors | Sartorius | 18-5020 | |
| 1X Kinetic Buffer | Sartorius | 18-1105 | 910031 |
| Running buffer: HBST, pH: | Pinetree | | |
| 7.3 | therapeutics | | |
| Pierce Antibody | ThermoFisher | 90407 | |
| Biotinylation | Scientific | | |
| Kit for IP | | | |

[0542] CendR Peptides

[0543] The CendR peptides evaluated are provided in the table below.

TABLE 26
CendR peptides evaluated.

| Virus | Protein | Sequence | SEQ ID NO. | Catalog No. |
|---|---|---|---|---|
| Dengue | polyprotein | GTCTQSGERRREKR | 169 | 122453-1 |
| RSV | F | KNTNVTLSKKRKRR | 170 | 122453-2 |
| Hantavirus | glycoprotein | LTHKMIEESHRLRR | 171 | 122453-3 |
| EBV | EBNA3C | VSFKPPPPPSRRRR | 172 | 122453-4 |
| EBV (uncleaved) | EBNA3C | VSFKPPPPPSRRRRGACVVY | 173 | 122453-14 |
| SARS-COV-2 Wuhan | Spike | CASYQTQTNSPRRAR | 174 | 112551-7 |
| SARS-COV-2 Wuhan | Spike | CASYQTQTNSPRRARSVASQSIIAYTMSLG | 175 | 112551-5 |
| (uncleaved) | | | | |
| SARS-COV-2 UK | Spike | ASYQTQTNSHRRAR | 176 | 122453-5 |
| SARS-COV-2 India | Spike | ASYQTQTNSRRRAR | 177 | 122453-6 |
| SARS-COV-2 India | Spike | ASYQTQTNSRRRARSVASQSIIAY | 178 | 122453-15 |
| (uncleaved) | | | | |
| HCoV-OC43 | Spike | GSGYCVDYSKNRRSR | 179 | 122453-7 |
| MERS-COV | Spike | LLEPVSISTGSRSAR | 180 | 122453-8 |
| MERS-COV | Spike | LLEPVSISTGSRSARSAIEDLLFDK | 181 | 122453-16 |
| (uncleaved) | | | | |
| HSV-1 | VP22 | ERPRAPARSASRPRR | 182 | 122453-9 |
| HSV-1 | VP22 | ERPRAPARSASRPRRPV | 183 | 122453-17 |
| (uncleaved) | | | | |
| IAV H5N1 | Hemagglutinin | VLATGLRNVPQRKKR | 184 | 122453-10 |
| HPV | L1 | PTTSSTSTTAKRKKR | 185 | 122453-11 |
| Human | attachment | IDMLKARVKNRVAR | 186 | 122453-12 |
| Metapneumovirus | glycoprotein | | | |
| HIV | GP-160/GP-120 | AKRRVVQREKR | 187 | 122453-13 |
| HIV (uncleaved) | GP-160 | AKRRVVQREKRAVGIGALFLG | 188 | 122453-18 |

[0544] Construct molecules binding viral proteins and CendR peptide as well as the K_{D} determination were performed using the Octet Red 96 system, as described below.

[0545] Construct Molecules Binding to Viral Proteins: Methods

[0546] Construct molecules were immobilized at varying concentrations (0.55-1.56 μg/mL) of in 1×Kinetic buffer (1×PBS pH 7.4, 0.1% w/v BSA, 0.002% v/v Tween-20) onto Anti-hIgG Fc biosensors with a loading time of 180 seconds for each. Baseline post-loading was performed for 60 seconds. Next, 25 nM, 50 nM, and 100 nM of recombinant viral protein/s were prepared in 1×Kinetic Buffer. Reference sensors were generated by applying Viral proteins over a blank Anti-hIgG Fc biosensors (no construct molecules). The association (Kₐ) and dissociation (K_{d}) steps were 300 seconds each. Data was analyzed using the Octet analysis software with 1:1 or 2:1 model fit applied which reports a dissociation constant K_{D} (M).

[0547] Construct Molecules Binding to Biotinylated CendR Peptide: Methods

[0548] Constructs having the amino acid sequences set forth in SEQ ID NOs: 113, 122, 154, and 193 were evaluated. CendR peptides were immobilized at varying concentrations (0.05-0.65 μg/mL) of in 1×Kinetic buffer (described above) onto streptavidin (SA) biosensors with a loading time of 180 seconds for each. Baseline post-loading was performed for 60 seconds. Next, 100 nM of the construct molecules having an amino acid sequence set forth in SEQ ID NOs: SEQ ID NOs: 113, 122, 154, and 193 molecules were prepared in 1×Kinetic Buffer. Reference sensors were generated by applying construct molecules over a blank streptavidin biosensors surface (no CendR peptide). The association (Kₐ) and dissociation (K_{d}) steps were 300 seconds each. The data was analyzed using the Octet analysis software with 1:1 model fit applied which reports a dissociation constant K_{D} (M).

[0549] Results

[0550] Binding of Construct Molecules to Recombinant RSV F Protein

[0551] The impact of constructs binding RSV-F proteins with high affinity increases the likelihood of the platform being able to provide a therapeutic mechanism to fight RSV (see table below).

TABLE 27
Monovalent Binding kinetics of Vi-TRAP
Against Various Viral Proteins.

| SEQ ID NO. | Target | K_{D} |
|---|---|---|
| 113 | RSV F protein | <1 nM |
| 121 | RSV F protein | <1 nM |
| 122 | RSV F protein | <1 nM |
| 135 | RSV F protein | <1 nM |
| 136 | RSV F protein | <1 nM |
| 137 | RSV F protein | <1 nM |
| 115 | RSV F protein | <1 nM |
| 116 | RSV F protein | <1 nM |
| 133 | RSV F protein | <1 nM |

[0552] Binding of Construct Molecules to the CendR Peptide

[0553] The table below shows the results of the study evaluating construct molecule binding to CendR peptides.

TABLE 28
Monovalent binding kinetics of construct molecules against
various viral proteins. Here, “+++” means
strongest (top tier) binding signal; “++”
means tier two binding; “+” means lowest tier
binding signal; and “NB” means none binding.

| | CendR | Construct SEQ ID NO. | | | |
|---|---|---|---|---|---|
| CendR Sequence Species | SEQ ID NO. | 113 | 122 | 154 | 193 |
| Dengue | 169 | ++ | +++ | + | NB |
| RSV | 170 | + | +++ | ++ | NB |
| Hantavirus | 171 | ++ | +++ | + | NB |
| EBV | 172 | ++ | +++ | + | NB |
| EBV (uncleaved) | 173 | NB | NB | + | NB |
| SARS-CoV-2 Wuhan | 174 | ++ | +++ | + | NB |
| SARS-CoV-2 Wuhan | 175 | NB | NB | + | NB |
| (uncleaved) | | | | | |
| HCoV-OC43 | 176 | ++ | +++ | + | NB |
| MERS-CoV | 177 | ++ | +++ | + | NB |
| MERS-CoV (uncleaved) | 178 | NB | NB | + | NB |
| HSV-1 | 179 | ++ | +++ | + | NB |
| HSV-1 (uncleaved) | 180 | NB | NB | + | NB |
| IAV H5N1 | 181 | ++ | +++ | + | NB |
| HPV | 182 | ++ | +++ | + | NB |
| Human Metapneumovirus | 183 | ++ | +++ | + | NB |
| HIV | 184 | ++ | +++ | + | NB |
| HIV (uncleaved) | 185 | NB | NB | NB | NB |

[0554] Conclusions

[0555] The goals of the studies described herein were to establish binding characteristics and determine K_{D} of construct molecules to recombinant RBD viral protein and the CendR peptide Based on the data presented, the following conclusions can be made: (1) the construct molecules bind RSV F protein with high affinity in the monovalent format; and (2) Constructs having an amino acid sequence set forth in SEQ ID NOs: 113, 122, and 154 exhibit broad spectrum of viral CendR motifs in the octet assay format. Taken together, the data presented here suggests that the biological effects of the construct molecules of the present invention bind and may prevent infectivity.

### Example 15. ELISA Testing of Respiratory Syncytial Virus (RSV)

[0556] Construct molecules were evaluated testing binding affinity of constructs of the present invention to respiratory syncytial virus (RSV) F glycoprotein via ELISA.

[0557] Reagents and Materials

[0558] Reagents used were as follows: 1×DPBS (Corning, Corning, NY; Catalog No. 21-031-CM); Tween-20 (100%) (Boston BioProducts, Ashland, MA; Catalog No. P-934); Washing buffer: PBST (0.02% Tween-20 in 1×DPBS); Dry Milk Powder (Research Products International, Mt. Prospect, IL; Catalog No. M17200-1000.0); RSV-F (amino acids 1-529), (Extracellular Domain) protein (His tag), ABIN2006856, (Antibodies-online, Inc, Limerick, PA); Anti-Human IgG-HRP Conjugate (Abcam, Cambridge, United Kingdom; Catalog No. ab6759); TMB ELISA Substrate (High Sensitivity) (Abcam, Cambridge, United Kingdom; Catalog No. ab171523); ELISA STOP Solution (Invitrogen by ThermoFisher Scientific, Waltham, MA; Catalog No. SS04); and Pierce™ 96-well high binding ELISA plate (ThermoFisher Scientific, Waltham, MA; Catalog No. 15041).

[0559] Equipment

[0560] The ELISA testing was performed with the following equipment: 450 nm 96 well SpectraMax M2e Microplate Reader (Molecular Devices, San Jose, CA); Wellwash Versa Microplate Washer (ThermoFisher Scientific, Waltham, MA); P20, P200, P1000, and Multi-channel pipets (Eppendorf).

[0561] Procedure

[0562] The ELISA testing was performed according to the following steps:

[0563] Step 1: Plate 100 μL of 3 μg/mL of RSV F protein in PBS in all the wells of a 96-well high protein bind plate using a multichannel pipettor; Step 2: Incubate plate overnight at 2-8C; Step 3: Wash plates 3× with 1×PBS with 0.05% Tween-20 (PBST); Step 4: Add 200 μL per well on all plates with 5% Dry Milk in 1×PBS; Step 5: Incubate plates 1 hour at room temperature; Step 6: Wash plate 3× with 1×PBS with 0.05% Tween-20 (PBST); Step 7: Add 100 μL of PBS in columns 8-12; Step 8: Add 200 μL (1 μg/mL in PBS) of each construct in wells A1 to H1; Step 9: Using a multichannel pipettor serially transfer 100 μL of each construct from Col1 to Col 11. Discard the extra 100 μL from Col 11. Leave Col 12 with PBS only; Step 10: Incubate 1 hour at RT; Step 11: Wash plate 3× with 1×PBS with 0.05% Tween-20 (PBST); Step 12: Add 200 μL of Rabbit anti-human IgG HRP at a 1:20,000 dilution in PBS to all wells on all plates; Step 13: Incubate 1 hour at RT; Step 14: Wash plate 3× with 1×PBS with 0.05% Tween-20 (PBST); Step 15: Add 100 μL of TMB reagent to all wells; Step 16: Incubate at room temperature for 15 minutes; Step 17: Add 100 μL of stop reagent to each well; Step 18: Read Absorption at ABS450.

[0564] Results of the ELISA assay are presented in the tables below.

TABLE 29
ELISA results. Half maximal effective concentration
(EC₅₀) amounts are shown in nM.

| SEQ ID NO. | EC₅₀ (nM) |
|---|---|
| 122 | 23.3 |
| 154 | 185.2 |
| 203 | 69.71 |
| 192 | 53.86 |
| 128 | 42.47 |
| 129 | 592.6 |
| 204 | 91.47 |
| 205 | 39.19 |
| 206 | 22.72 |
| 193 | 749.2 |
| 207 | 17.07 |
| 208 | 1570 |

TABLE 30
Half maximal effective concentration (EC₅₀) amounts
for a given construct as determined by a Varioskan
Plate reader (ThermoFisher) and SpectroMax.

EC50 (nM)

| SEQ ID NO. | Varioskan | SpectroMax |
|---|---|---|
| 113 | 372.10 | 323.10 |
| 191 | 91.00 | 95.65 |
| 121 | 5.65 | 5.90 |

### Example 16. Binding Analysis of Respiratory Syncytial Virus (RSV)

[0565] Construct molecules were evaluated testing binding affinity of constructs of the present invention to respiratory syncytial virus (RSV) F glycoprotein via an Octet® Red 96 system (ForteBio).

TABLE 31
Binding results of constructs and RSV.

| | | | | Reduced | | |
|---|---|---|---|---|---|---|
| SEQ ID | | | | Heparin | VEGF | |
| NO. | Structure | Mutation | Strategy | binding | binding | Results |
| 113 | b1-Fc | WT | single b1 | No | Unmodified | + |
| 114 | b1-Fc | K373E, | single b1, heparin | Yes | Unmodified | No |
| | | | binding ↓(E) in | | | binding |
| | | | b1 | | | |
| 121 | b1b1- | WT | quadruple b1 | No | Unmodified | ++ |
| | b1b1-Fc | | | | | |
| 135 | b1b1-Fc | WT | single b1 in N- | No | Unmodified | ++ |
| | | | term and C-term | | | |
| 137 | b1-Fc-b1 | WT | single b1 in N- | No | Unmodified | + |
| | | | term and C-term | | | |

Here, “+++” means strongest (top tier) binding signal; “++” means tier two binding; “+” means lowest tier binding signal; and “NB” means none binding. “↓” means decreased. “(E)” means the amino acid is substituted with a glutamic acid residue.

### Example 17. ELISA Testing of SARS-CoV-2

[0566] Construct molecules were evaluated testing binding affinity of constructs of the present invention to SARS-CoV-2 via ELISA. The ELISA was performed according the methods described in Example 15 above.

TABLE 32
ELISA results.

| SEQ | | | | Reduced | | |
|---|---|---|---|---|---|---|
| ID | | Mu- | | Heparin | VEGF | EC₅₀ |
| NO. | Structure | tation | Strategy | binding | binding | (nM) |
| 122 | b1b2-Fc | WT | single b1b2 | No | Un- | 3.09 |
| | | | | | modified | |
| 138 | b1b2- | WT | double b1b2 | No | Un- | 109.8 |
| | b1b2-Fc | | | | modified | |
| 139 | b1b2- | E319A | double b1b2 | No | Increased | 81.72 |
| | b1b2-Fc | | (VEGF binding | | | |
| 142 | b1b2-Fc- | WT | single b1b2 in | No | Un- | Un- |
| | b1b2 | | N-term and C- | | modified | stable |
| | | | term | | | |

Half maximal effective concentration (EC₅₀) amounts are shown in nM.
N-term and C-term means N-terminus and C-terminus, respectively.
“↓” means increased.

### Example 18. Binding Analysis of Influenza A H5N1 Virus (IAV H5N1)

[0567] Construct molecules were evaluated testing binding affinity of constructs of the present invention to IAV H5NT via an Octet® Red 96 system (ForteBio).

TABLE 33

| | | | | Reduced | | |
|---|---|---|---|---|---|---|
| SEQ ID | | | | Heparin | VEGF | |
| NO. | Structure | Mutation | Strategy | binding | binding | Results |
| 113 | b1-Fc | WT | single b1 | No | Unmodified | 18.95 |
| | | | | | | nM |
| 114 | b1-Fc | K373E, | single b1, heparin | Yes | Unmodified | ND |
| | | | binding ↓(E) in b1 | | | |
| 115 | b1b1-Fc | K373E, | double b1, heparin | Yes | Unmodified | ND |
| | | | binding ↓ (E) in b1 | | | |
| 116 | b1b1b1-Fc | K373E, | triple b1, heparin | Yes | Unmodified | ND |
| | | | binding ↓ (E) in b1 | | | |
| 121 | b1b1- | WT | quadruple b1 | No | Unmodified | 7.817 |
| | b1b1-Fc | | | | | pM |
| 122 | b1b2-Fc | WT | single b1b2 | No | Unmodified | 17.46 |
| | | | | | | nM |
| 155 | b1b2-Fc | R513A, | single b1b2, | Yes | Unmodified | ND |
| | | K514A, | heparin binding ↓ | | | |
| | | K516A | (A) in b2 | | | |
| 128 | b1b2-Fc | K358E, | single b1b2, | Yes | Unmodified | ND |
| | | K373E, | heparin binding ↓ | | | |
| | | R513E, | in b1b2 | | | |
| | | K514E, | | | | |
| | | K516E | | | | |
| 129 | b1b2-Fc | Y297A, | single b1b2, no | Yes | Removed | ND |
| | | S345A, | VEGF binding, | | | |
| | | Y353A, | heparin binding ↓ | | | |
| | | K358E, | in b1b2 | | | |
| | | K373E, | | | | |
| | | R513E, | | | | |
| | | K514E, | | | | |
| | | K516E | | | | |
| 133 | b1-Fc-b1 | K373E, | single b1 in N-term | Yes | Unmodified | ND |
| | | | and C-term, | | | |
| | | | heparin binding (E) | | | |
| | | | ↓ in b1 | | | |
| 135 | b1b1-Fc | WT | single b1 in N-term | No | Unmodified | ND |
| | | | and C-term | | | |
| 136 | b1b1b1-Fc | WT | single b1 in N-term | No | Unmodified | ND |
| | | | and C-term | | | |
| 137 | b1-Fc-b1 | WT | single b1 in N-term | No | Unmodified | ND |
| | | | and C-term | | | |

ND = Not determined.
N-term and C-term means N-terminus and C-terminus, respectively.
“↓” means decreased “(A)” means the amino acid is substituted with an alanine residue. “(E)” means the amino acid is substituted with a glutamic acid residue.

### Example 19. Bioinformatic Approaches to Identifying CendR

[0568] Predicting Furin Cleavage Sites

[0569] Furin is a conserved protease that cleaves a “R-X-[KR]-R” motif resulting in CendR peptides. Furin is an ancient gene family with orthologs in all vertebrates and paralogs dating back to the divergence of animals and fungi.

[0570] In order to identify furin cleavage sites in human, viral, and bacterial proteins—and the subsequent formation of CendR peptides for targeting by constructs of the present invention—a bioinformatic evaluation was performed to identified extended consensus sequences.

[0571] To identify furin cleavage sites, a RefSeq peptide database was evaluated, comprising the following records: Human: 114,963 records; Viruses: 477,258 records; and Bacteria: 161,430,766 records. In addition, two prediction software programs were used: ProP prediction software, and the PiTou Furin cleavage site computational prediction tool.

[0572] The ProP tool is a neural network with 94.7% sensitivity and 83.7% specificity. An exemplary description of ProP is provided in Duckert et al., Prediction of proprotein convertase cleavage sites Protein Eng Des Sel. 2004 Jan. 17(1):107-12, the disclosure of which is incorporated herein by reference in its entirety.

[0573] PiTou Furin cleavage site computational prediction tool (hereinafter “PiTou”) is a knowledge-based tool, with 96.9% sensitivity and 97.3% specificity. PiTou is based on 131 known furin cleavage sites; and 4265 arginine sites where furin does not cleave. Log(odds) scores are provided based on a profile Hmm of furin binding sites and physical properties such as volume, charge, and hydrophobicity.

[0574] An exemplary description of the PiTou Furin cleavage site computational prediction tool is provided in Tian et al., Computational prediction of furin cleavage sites by a hybrid method and understanding mechanism underlying diseases. Sci Rep. 2012; 2: 261, the disclosure of which is incorporated herein by reference in its entirety.

[0575] The RefSeq peptide results are shown in the table below.

TABLE 34
RefSeq peptide results

| | No. of sites | No. of distinct | |
|---|---|---|---|
| Database | (Score >0) | peptides | Database size |
| Human | 101,892 | 50,046 | 115,140 |
| Viruses | 117,993 | 80,359 | 477,258 |
| Bacteria | 60,546,480 | 42,054,923 | 161,430,766 |

[0576] FIGS. 43-45 show the cumulative distribution of PiTou scores in human, viral, and bacterial peptides, respectively. FIG. 46 shows the PiTou scores at known viral cleavage sites. Known sites were based off of 30 viruses, and the PiTou scores were as follows: 90%>5 (99%); 75%>7 (99.9%); and 50%>11 (99.99%). FIG. 47 shows a prioritized PiTou score distribution.

[0577] Novel predicted targets were prioritized based on known diseases, PiTou score, secreted peptides, and conservation. Human known diseases were identified based on OMIM, ClinVar, GnomAD, and MGI. Bacteria and viruses were identified based on WHO, RKI, the Bode Science Center, and Major Infectious Diseases 3^{rd} Ed.

TABLE 35
PiTou score In(odds).

| PiTou Score | Odds | Probability |
|---|---|---|
| 0 | 1:1 | 50% |
| 2.3 | 10:1 | 90% |
| 4.6 | 100:1 | 99% |
| 6.9 | 1000:1 | 99.9% |
| 9.2 | 10000:1 | 99.99% |
| 11.5 | 100000:1 | 99.999% |
| 13.8 | 1000000:1 | 99.9999% |

[0578] Secreted peptides were prioritized based on DeepSig, a neural network with separate models for eukaryotes and bacterial; Cell-Ploc 2.0 (a pre-computed subcellular localization of different proteins); and Spdb 5.1 (a database of signal peptides in Swiss-Prot & EMBL entries; see Choo, et al. 2005).

[0579] An exemplary description of DeepSig is provided in Savojardo et al., DeepSig: deep learning improves signal peptide detection in proteins. Bioinformatics. 2018 May 15; 34(10):1690-1696, the disclosure of which is incorporated herein by reference in its entirety.

[0580] An exemplary description of Cell-Ploc 2.0 is provided in Chou and Shen, Cell-PLoc: a package of Web servers for predicting subcellular localization of proteins in various organisms, Nat Protoc. 2008; 3(2):153-62, the disclosure of which is incorporated herein by reference in its entirety.

[0581] An exemplary description of Spdb 5.1 is provided in Choo et al., 2005, the disclosure of which is incorporated herein by reference in its entirety.

TABLE 36
Top scoring viral proteins with predicted furin cleavage sites. Here,
the column entitled “Protein” shows the NCBI Accession No. of the predicted protein. The
column entitled “Score” shows the PiTou score.

| Protein | Description | R_position | Motif-P14-P1 | Score |
|---|---|---|---|---|
| NP_041724.2 | polyprotein [West Nile | 215 | GRCTKTRHSRRSRR | 15.3974 |
| | virus] | | | |
| YP_001129354.1 | ORF8 [Human | 440 | ASPMTTSASRRKRR | 15.2278 |
| | gammaherpesvirus 8] | | | |
| YP_009273009.1 | nucleocapsid protein | 433 | ENDKPKSQRRRKKR | 14.6575 |
| | [Rousettus bat | | | |
| | coronavirus] | | | |
| YP_173238.1 | spike glycoprotein | 760 | YNSPSSSSSRRKRR | 14.6348 |
| | [Human coronavirus | | | |
| | HKU1] | | | |
| YP_009337505.1 | Cy89 [Cynomolgus | 432 | EHANNTNATRRRKR | 14.6088 |
| | cytomegalovirus] | | | |
| NP_044011.1 | MC60R [Molluscum | 364 | ALPAARPRRSRTRR | 13.8656 |
| | contagiosum virus subtype | | | |
| | 1] | | | |
| NP_044078.1 | MC127R [Molluscum | 143 | PALRGGSYRARKRR | 13.8432 |
| | contagiosum virus subtype | | | |
| | 1] | | | |
| YP_209233.1 | spike glycoprotein (S) | 769 | GLCVDYSKSRRARR | 13.7021 |
| | [Murine hepatitis virus | | | |
| | strain JHM] | | | |
| NP_043135.1 | polyprotein [Tick-borne | 205 | YGRCGKQEGSRTRR | 13.647 |
| | encephalitis virus] | | | |
| YP_308669.1 | hemagglutinin [Influenza | 346 | LRNTPQRERRRKKR | 13.5885 |
| | A virus | | | |
| | (A/goose/Guangdong/1/ | | | |
| | 1996(H5N1))] | | | |
| YP_009137477.1 | UL55 [Papio ursinus | 453 | ANMTNASTSSRTKR | 13.3161 |
| | cytomegalovirus] | | | |
| NP_041726.1 | polyprotein precursor | 210 | GKCDSAGRSRRSRR | 13.2778 |
| | [Yellow fever virus] | | | |
| NP_073286.1 | polyprotein [Dengue virus | 204 | GTCTQSGERRREKR | 13.2573 |
| | 4] | | | |
| YP_004940082.1 | envelope glycoprotein B | 451 | SVVNATSKSSRRRR | 13.165 |
| | [Aotine betaherpesvirus 1] | | | |
| NP_040831.1 | spike protein [Infectious | 690 | ISLLLTNPSSRRKR | 12.7323 |
| | bronchitis virus] | | | |
| NP_044095.1 | MC144R [Molluscum | 213 | RAPPLRALLRRLRR | 12.3666 |
| | contagiosum virus subtype | | | |
| | 1] | | | |
| YP_073779.1 | envelope glycoprotein B | 398 | LENFSNASRKRRKR | 12.3138 |
| | [Human betaherpesvirus | | | |
| | 7] | | | |
| NP_044005.1 | MC054L [Molluscum | 162 | PENADAAGARRRRR | 12.2349 |
| | contagiosum virus subtype | | | |
| | 1] | | | |
| NP_042932.1 | glycoprotein B [Human | 399 | MFLEQGSEKIRRRR | 12.0529 |
| | betaherpesvirus 6A] | | | |
| YP_001129508.1 | BALF4 [Human | 432 | RGSTSAAVLRRRRR | 12.0276 |
| | herpesvirus 4 type 2] | | | |
| YP_401713.1 | envelope glycoprotein B | 432 | RGSTPAAVLRRRRR | 11.9466 |
| | [Human | | | |
| | gammaherpesvirus 4] | | | |
| YP_009094054.1 | capsid [Rabbit astrovirus | 21 | VPSRGQRARRRRAR | 11.8699 |
| | TN/2208/2010] | | | |
| YP_009010983.1 | ORF2 [Porcine astrovirus | 30 | TTVSNRRGRRRRRR | 11.7415 |
| | 4] | | | |
| YP_009362094.1 | glycoprotein precursor | 124 | LTHKMIEESHRLRR | 11.5376 |
| | [Sangassou | | | |
| | orthohantavirus] | | | |
| NP_044596.1 | Fusion protein (F) | 136 | KNTNVTLSKKRKRR | 11.4852 |
| | [Respiratory syncytial | | | |
| | virus] | | | |
| NP_056863.1 | fusion glycoprotein | 136 | KNLNVSISKKRKRR | 11.4368 |
| | [Human | | | |
| | orthopneumovirus] | | | |
| NP_056922.1 | fusion protein [Measles | 112 | RPVQSVASSRRHKR | 11.4277 |
| | morbillivirus] | | | |
| YP_009505809.1 | capsid protein precursor | 69 | GQGPRNRRRSRLRR | 11.3216 |
| | [Bat astrovirus | | | |
| | Hp/Guangxi/LC03/2007] | | | |
| YP_009256201.1 | nucleocapsid protein | 29 | PSQKRGRSRSRSRR | 11.2968 |
| | [Ferret coronavirus] | | | |
| NP_042099.1 | putative DNA-binding | 137 | DISDVKVLAARLKR | 11.2105 |
| | virion core protein | | | |
| | [Variola virus] | | | |
| YP_001129465.1 | EBNA-3C [Human | 501 | VSFKPPPPPSRRRR | 11.1623 |
| | herpesvirus 4 type 2] | | | |
| NP_043984.1 | MC033L [Molluscum | 578 | RSTRTARRARRARR | 11.1578 |
| | contagiosum virus subtype | | | |
| | 1] | | | |
| NP_054711.1 | fusion protein [Mumps | 102 | NIASPSSGSRRHKR | 11.1454 |
| | rubulavirus] | | | |
| NP_057863.1 | p27 [Human T-cell | 10 | MPKTRRRPRR | 11.0752 |
| | leukemia virus type I] | | | |
| YP_001469634.1 | polyprotein [Hepatitis C | 2197 | SHITAETASRRLKR | 11.0478 |
| | virus genotype 6] | | | |
| YP_081514.1 | envelope glycoprotein B | 460 | NRSSLNLTHNRTKR | 11.0306 |
| | [Human betaherpesvirus | | | |
| | 5] | | | |
| NP_056776.2 | polyprotein [Dengue virus | 205 | GTCTTMGEHRREKR | 11.0097 |
| | 2] | | | |
| NP_043979.1 | MC028L [Molluscum | 19 | RRKSKYQPLRRQRR | 11.0076 |
| | contagiosum virus subtype | | | |
| | 1] | | | |
| NP_057865.1 | gp46 SU [Human T-cell | 312 | SLSPVPTLGSRSRR | 10.9953 |
| | leukemia virus type I] | | | |
| NP_049560.1 | reverse | 1041 | SLSPVPTLGSRSRR | 10.9953 |
| | transcriptase/envelope | | | |
| | protein [Simian T- | | | |
| | lymphotropic virus 1] | | | |
| NP_690589.2 | structural polyprotein | 325 | LQASLTCSPHRQRR | 10.9598 |
| | [Chikungunya virus] | | | |
| NP_042023.1 | glycoprotein [Borna | 249 | YTSSCRPRLKRRRR | 10.9553 |
| | disease virus 1] | | | |
| YP_009555245.1 | nucleocapsid protein | 274 | EVROKILNKPRQKR | 10.8307 |
| | [Human coronavirus | | | |
| | OC43] | | | |
| NP_043993.1 | MC042L [Molluscum | 343 | LVGDTRRPPARPRR | 10.7428 |
| | contagiosum virus subtype | | | |
| | 1] | | | |
| YP_009824998.1 | spike glycoprotein | 537 | FYIKITNGTRRFRR | 10.7175 |
| | [Infectious bronchitis | | | |
| | virus] | | | |
| YP_007188578.1 | ORF1a polyprotein | 1106 | QSVTVKPKRLRKKR | 10.6809 |
| | [Betacoronavirus England | | | |
| | 1] | | | |
| YP_009047202.1 | 1AB polyprotein [Middle | 1106 | QNVTVKPKRLRKKR | 10.6809 |
| | East respiratory syndrome- | | | |
| | related coronavirus] | | | |
| YP_009755897.1 | spike protein [Canada | 558 | QYYQLFSNNTRRKR | 10.6322 |
| | goose coronavirus] | | | |
| YP_009361855.1 | ORFla protein [Bat | 1102 | QIVVSKPKRLRKKR | 10.5947 |
| | coronavirus] | | | |
| NP_040154.2 | envelope glycoprotein B | 494 | SPQKHPTRNTRSRR | 10.5828 |
| | [Human alphaherpesvirus | | | |
| | 3] | | | |
| YP_009163895.1 | L2 [Human | 9 | MYRTKRVKR | 10.5448 |
| | papillomavirus] | | | |
| YP_009664789.1 | capsid protein precursor | 48 | STTTAPRAPRRRRR | 10.5338 |
| | [Mamastrovirus 18] | | | |
| YP_009380532.1 | capsid protein | 45 | RAQQARRRRNRTRR | 10.5301 |
| | [Mamastrovirus 2] | | | |
| YP_009272536.1 | polyprotein [Hepatitis C | 2196 | SHITAETAARRLRR | 10.4354 |
| | virus genotype 7] | | | |
| NP_056788.1 | capsid protein [Hepatitis E | 333 | VSRYSSTARHRLRR | 10.2448 |
| | virus] | | | |
| NP_598404.1 | fusion protein [Human | 106 | KISTVTDTKTRQKR | 9.72278 |
| | rubulavirus 2] | | | |
| YP_009268921.1 | glycoprotein [Borna | 249 | YTSSCRPRLVRRRR | 9.65791 |
| | disease virus 2] | | | |
| NP_041006.1 | env propeptide, (putative; | 308 | SLAPVPPPATRRRR | 9.40027 |
| | first expressed exon); | | | |
| | putative [Human T- | | | |
| | lymphotropic virus 2] | | | |
| YP_009724390.1 | surface glycoprotein | 685 | ASYQTQTNSPRRAR | 9.19633 |
| | [Severe acute respiratory | | | |
| | syndrome coronavirus 2] | | | |
| YP_009141014.1 | glycoprotein precursor | 1060 | WILRVVLRRSRIRR | 8.95328 |
| | [Bhanja virus] | | | |
| YP_002455789.1 | envelope glycoprotein | 307 | LSPLPGAPLTRRRR | 8.92879 |
| | [Human T-lymphotropic | | | |
| | virus 4] | | | |
| YP 009047204.1 | spike protein [Middle East | 887 | LEPVSISTGSRSAR | 8.55386 |
| | respiratory syndrome- | | | |
| | related coronavirus] | | | |
| YP 007188579.1 | spike protein | 887 | LEPVSISTGSRSAR | 8.55386 |
| | [Betacoronavirus England | | | |
| | 1] | | | |
| YP 142353.1 | transmembrane | 490 | RVCCKRVRRRRSGR | 8.3646 |
| | glycoprotein G [Mokola | | | |
| | lyssavirus] | | | |
| YP 009137152.1 | envelope glycoprotein L | 159 | RAGCVNFDYSRTRR | 8.32858 |
| | [Human alphaherpesvirus | | | |
| | 2] | | | |
| YP_009137096.1 | envelope glycoprotein H | 545 | AGVPSAVQRERARR | 7.98401 |
| | [Human alphaherpesvirus | | | |
| | 1] | | | |
| NP_950235.1 | glycoprotein precursor | 247 | VQDTHPSPTNRSKR | 7.60291 |
| | [Crimean-Congo | | | |
| | hemorrhagic fever | | | |
| | orthonairovirus] | | | |
| YP_009254001.1 | G [Lonestar tick chuvirus | 618 | VNPEWTPFRERLRR | 7.57886 |
| | 1] | | | |
| NP_050220.1 | Glycoprotein B [Human | 399 | MVLEQGSVNLRRRR | 7.3109 |
| | betaherpesvirus 6B] | | | |
| YP_009055225.1 | glycoprotein [Marburg | 435 | SPTTRPPIYFRKKR | 7.06092 |
| | marburgvirus] | | | |
| NP_056796.1 | transmembrane | 218 | GMSCDIFTNSRGKR | 6.6124 |
| | glycoprotein G [Rabies | | | |
| | lyssavirus] | | | |
| NP_982303.1 | polyprotein [Oropouche | 707 | ASKLLDINLGRSTR | 6.2933 |
| | virus] | | | |
| YP_001531156.1 | glycoprotein [Marburg | 435 | SSTAQHLVYFRRKR | 6.13352 |
| | marburgvirus] | | | |
| YP_009227121.1 | glycoprotein precursor | 516 | LLFVCKAVKGIKRR | 5.42962 |
| | [Tofla virus] | | | |
| YP_003848705.1 | glycoprotein [Rift Valley | 466 | KPLCVGYERVVVKR | 5.24779 |
| | fever virus] | | | |
| YP_009555241.1 | spike surface glycoprotein | 757 | SGYCVDYSKNRRSR | 4.64604 |
| | [Human coronavirus | | | |
| | OC43] | | | |
| YP_009362075.1 | glycoprotein precursor | 291 | GAKFETSDRIRLHR | 4.63 |
| | [Kaeng Khoi virus] | | | |
| NP_067151.1 | fusion protein [Human | 109 | NQESNENTNPRTKR | 4.43207 |
| | respirovirus 3] | | | |
| YP_009177714.1 | glycoprotein [Tacheng | 267 | HLGPNKEYMRVLRR | 4.22628 |
| | Tick Virus 4] | | | |
| YP_009512922.1 | polyprotein, partial [Tete | 728 | NYWAHLENTORVQR | 4.1588 |
| | orthobunyavirus] | | | |
| YP_009118475.1 | hemagglutinin [Influenza | 463 | ADSEMDKLYERVKR | 3.97254 |
| | A virus | | | |
| | (A/Shanghai/02/2013 | | | |
| | (H7N9))] | | | |

TABLE 37
Top 62 highest scoring viral proteins with predicted furin cleavage
sites. Here, the column entitled “Protein” shows the NCBI Accession No. of the predicted
protein. The column entitled “Score” shows the PiTou score.

| Protein | Description | R_position | Motif-P14-P1 | Score |
|---|---|---|---|---|
| NP_041724.2 | polyprotein [West Nile | 215 | GRCTKTRHSRRSRR | 15.3974 |
| | virus] | | | |
| YP_001129354.1 | ORF8 [Human | 440 | ASPMTTSASRRKRR | 15.2278 |
| | gammaherpesvirus 8] | | | |
| YP_173238.1 | spike glycoprotein | 760 | YNSPSSSSSRRKRR | 14.6348 |
| | [Human coronavirus | | | |
| | HKU1] | | | |
| NP_044011.1 | MC60R [Molluscum | 364 | ALPAARPRRSRTRR | 13.8656 |
| | contagiosum virus subtype | | | |
| | 1] | | | |
| NP_043135.1 | polyprotein [Tick-borne | 205 | YGRCGKQEGSRTRR | 13.647 |
| | encephalitis virus] | | | |
| YP_308669.1 | hemagglutinin [Influenza | 346 | LRNTPQRERRRKKR | 13.5885 |
| | A virus | | | |
| | (A/goose/Guangdong/1/ | | | |
| | 1996(H5N1))] | | | |
| NP_041726.1 | polyprotein precursor | 210 | GKCDSAGRSRRSRR | 13.2778 |
| | [Yellow fever virus] | | | |
| NP_073286.1 | polyprotein [Dengue virus | 204 | GTCTQSGERRREKR | 13.2573 |
| | 4]] | | | |
| NP_040831.1 | spike protein [Infectious | 690 | ISLLLTNPSSRRKR | 12.7323 |
| | bronchitis virus] | | | |
| YP_073779.1 | envelope glycoprotein B | 398 | LENFSNASRKRRKR | 12.3138 |
| | [Human betaherpesvirus | | | |
| | 7] | | | |
| NP_042932.1 | glycoprotein B [Human | 399 | MFLEQGSEKIRRRR | 12.0529 |
| | betaherpesvirus 6A] | | | |
| YP_001129508.1 | BALF4 [Human | 432 | RGSTSAAVLRRRRR | 12.0276 |
| | herpesvirus 4 type 2] | | | |
| YP_401713.1 | envelope glycoprotein B | 432 | RGSTPAAVLRRRRR | 11.9466 |
| | [Human | | | |
| | gammaherpesvirus 4] | | | |
| YP_009362094.1 | glycoprotein precursor | 124 | LTHKMIEESHRLRR | 11.5376 |
| | [Sangassou | | | |
| | orthohantavirus] | | | |
| NP_044596.1 | Fusion protein (F) | 136 | KNTNVTLSKKRKRR | 11.4852 |
| | [Respiratory syncytial | | | |
| | virus] | | | |
| NP__056863.1 | fusion glycoprotein | 136 | KNLNVSISKKRKRR | 11.4368 |
| | [Human | | | |
| | orthopneumovirus] | | | |
| NP_056922.1 | fusion protein [Measles | 112 | RPVQSVASSRRHKR | 11.4277 |
| | morbillivirus] | | | |
| YP_001129465.1 | EBNA-3C [Human | 501 | VSFKPPPPPSRRRR | 11.1623 |
| | herpesvirus 4 type 2] | | | |
| NP_054711.1 | fusion protein [Mumps | 102 | NIASPSSGSRRHKR | 11.1454 |
| | rubulavirus] | | | |
| NP_057863.1 | p27 [Human T-cell | 10 | MPKTRRRPRR | 11.0752 |
| | leukemia virus type I] | | | |
| YP_001469634.1 | polyprotein [Hepatitis C | 2197 | SHITAETASRRLKR | 11.0478 |
| | virus genotype 6] | | | |
| YP_081514.1 | envelope glycoprotein B | 460 | NRSSLNLTHNRTKR | 11.0306 |
| | [Human betaherpesvirus] | | | |
| NP_056776.2 | polyprotein [Dengue virus | 205 | GTCTTMGEHRREKR | 11.0097 |
| | 2] | | | |
| NP_057865.1 | gp46 SU [Human T-cell | 312 | SLSPVPTLGSRSRR | 10.9953 |
| | leukemia virus type I] | | | |
| NP_690589.2 | structural polyprotein | 325 | LQASLTCSPHRQRR | 10.9598 |
| | [Chikungunya virus] | | | |
| NP_042023.1 | glycoprotein [Borna | 249 | YTSSCRPRLKRRRR | 10.9553 |
| | disease virus 1] | | | |
| YP_009555245.1 | nucleocapsid protein | 274 | EVRQKILNKPRQKR | 10.8307 |
| | [Human coronavirus | | | |
| | OC43] | | | |
| YP_009824998.1 | spike glycoprotein | 537 | FYIKITNGTRRFRR | 10.7175 |
| | [Infectious bronchitis | | | |
| | virus] | | | |
| YP_007188578.1 | ORF1a polyprotein | 1106 | QSVTVKPKRLRKKR | 10.6809 |
| | [Betacoronavirus England | | | |
| | 1] | | | |
| YP_009047202.1 | 1AB polyprotein [Middle | 1106 | QNVTVKPKRLRKKR | 10.6809 |
| | East respiratory syndrome- | | | |
| | related coronavirus] | | | |
| NP_040154.2 | envelope glycoprotein B | 494 | SPQKHPTRNTRSRR | 10.5828 |
| | [Human alphaherpesvirus | | | |
| | 3] | | | |
| YP_009163895.1 | L2 [Human | 9 | MYRTKRVKR | 10.5448 |
| | papillomavirus] | | | |
| YP_009664789.1 | capsid protein precursor | 48 | STTTAPRAPRRRRR | 10.5338 |
| | [Mamastrovirus 18] | | | |
| YP_009380532.1 | capsid protein | 45 | RAQQARRRRNRTRR | 10.5301 |
| | [Mamastrovirus 2] | | | |
| YP_009272536.1 | polyprotein [Hepatitis C | 2196 | SHITAETAARRLRR | 10.4354 |
| | virus genotype 7] | | | |
| NP_056788.1 | capsid protein [Hepatitis E | 333 | VSRYSSTARHRLRR | 10.2448 |
| | virus] | | | |
| NP_598404.1 | fusion protein [Human | 106 | KISTVTDTKTRQKR | 9.72278 |
| | rubulavirus 2] | | | |
| YP_009268921.1 | glycoprotein [Borna | 249 | YTSSCRPRLVRRRR | 9.65791 |
| | disease virus 2] | | | |
| NP_041006.1 | env propeptide, (putative; | 308 | SLAPVPPPATRRRR | 9.40027 |
| | first expressed exon); | | | |
| | putative [Human T- | | | |
| | lymphotropic virus 2] | | | |
| YP_009724390.1 | surface glycoprotein | 685 | ASYQTQTNSPRRAR | 9.19633 |
| | [Severe acute respiratory | | | |
| | syndrome coronavirus 2] | | | |
| YP_009141014.1 | glycoprotein precursor | 1060 | WILRVVLRRSRIRR | 8.95328 |
| | [Bhanja virus] | | | |
| YP_002455789.1 | envelope glycoprotein | 307 | LSPLPGAPLTRRRR | 8.92879 |
| | [Human T-lymphotropic | | | |
| | virus 4] | | | |
| YP_009047204.1 | spike protein [Middle East | 887 | LEPVSISTGSRSAR | 8.55386 |
| | respiratory syndrome- | | | |
| | related coronavirus] | | | |
| YP_007188579.1 | spike protein | 887 | LEPVSISTGSRSAR | 8.55386 |
| | [Betacoronavirus England | | | |
| | 1] | | | |
| YP_142353.1 | transmembrane | 490 | RVCCKRVRRRRSGR | 8.3646 |
| | glycoprotein G [Mokola | | | |
| | lyssavirus] | | | |
| YP_009137152.1 | envelope glycoprotein L | 159 | RAGCVNFDYSRTRR | 8.32858 |
| | [Human alphaherpesvirus | | | |
| | 2] | | | |
| YP_009137096.1 | envelope glycoprotein H | 545 | AGVPSAVORERARR | 7.98401 |
| | [Human alphaherpesvirus] | | | |
| NP_950235.1 | glycoprotein precursor | 247 | VQDTHPSPTNRSKR | 7.60291 |
| | [Crimean-Congo | | | |
| | hemorrhagic fever | | | |
| | orthonairovirus] | | | |
| YP_009254001.1 | G [Lonestar tick chuvirus | 618 | VNPEWTPFRERLRR | 7.57886 |
| | 1] | | | |
| NP_050220.1 | Glycoprotein B [Human | 399 | MVLEQGSVNLRRRR | 7.3109 |
| | betaherpesvirus 6B] | | | |
| YP_009055225.1 | glycoprotein [Marburg | 435 | SPTTRPPIYFRKKR | 7.06092 |
| | marburgvirus] | | | |
| NP_056796.1 | transmembrane | 218 | GMSCDIFTNSRGKR | 6.6124 |
| | glycoprotein G [Rabies | | | |
| | lyssavirus] | | | |
| NP_982303.1 | polyprotein [Oropouche | 707 | ASKLLDINLGRSTR | 6.2933 |
| | virus] | | | |
| YP_001531156.1 | glycoprotein [Marburg | 435 | SSTAQHLVYFRRKR | 6.13352 |
| | marburgvirus] | | | |
| YP_009227121.1 | glycoprotein precursor | 516 | LLFVCKAVKGIKRR | 5.42962 |
| | [Tofla virus] | | | |
| YP_003848705.1 | glycoprotein [Rift Valley | 466 | KPLCVGYERVVVKR | 5.24779 |
| | fever virus] | | | |
| YP_009555241.1 | spike surface glycoprotein | 757 | SGYCVDYSKNRRSR | 4.64604 |
| | [Human coronavirus | | | |
| | OC43] | | | |
| YP_009362075.1 | glycoprotein precursor | 291 | GAKFETSDRIRLHR | 4.63 |
| | [Kaeng Khoi virus] | | | |
| NP_067151.1 | fusion protein [Human | 109 | NQESNENTNPRTKR | 4.43207 |
| | respirovirus 3] | | | |
| YP_009177714.1 | glycoprotein [Tacheng | 267 | HLGPNKEYMRVLRR | 4.22628 |
| | Tick Virus 4] | | | |
| YP_009512922.1 | polyprotein, partial [Tete | 728 | NYWAHLENTORVQR | 4.1588 |
| | orthobunyavirus] | | | |
| YP_009118475.1 | hemagglutinin [Influenza | 463 | ADSEMDKLYERVKR | 3.97254 |
| | A virus | | | |
| | (A/Shanghai/02/2013 | | | |
| | (H7N9))] | | | |

### Example 20. VEGF Binding Assay

[0582] To assess the binding of the constructs of the present invention molecules to VEGF₁₆₅: BLI binding studies using the Octet red 96 system were conducted. Briefly, constructs were immobilized on Anti-Human Fc Capture (AHC) biosensors and interrogated for binding to recombinant VEGF₁₆₅ that had been commercially sourced. Using BLI technology, the binding to VEGF₁₆₅ was interrogated using SEQ ID NOs: 122, 154, and 193 for binding affinity (equilibrium binding constant, K_{D}) in the monovalent format.

TABLE 38
Materials and equipment used in the VEGF binding assay.

| Name | Vendor | Catalog No. | Lot No. |
|---|---|---|---|
| 2X Kinetic Buffer | Sartorius | 18-1105 | 910031 |
| 1X PBS (Phosphate | Corning | 21-031-CM | 0421019 |
| buffered saline) | | | |
| HBS Buffer | | N/A | 20210510 |
| HEPES Buffer | Gibco | 15630-108 | 230487 |
| Solution | | | |
| VEGF₁₆₅ | Stem Cell | 78073 | 1000057286 |
| | Technologies | | |
| Red96e Forte Bio | Sartorius | | SN: FB-90470 |
| 96 Well Black Plate | Greiner Bio One | 655209 | N/A |
| AHC Biosensors | Sartorius | 18-5063 | 2104000311 |

[0583] Methods

[0584] Construct molecules of the present invention binding to VEGF₁₆₅ as well as the K_{D} determination of the interaction were performed using the Octet Red 96 system, while K_{D} determination. Briefly, molecules were immobilized at 1.5 μg/mL in 1× or 2×Kinetic buffer onto Anti-hIgG Fc biosensors with a loading times of 120 or 180 seconds. Baseline post-loading was performed for 60 seconds. Next, 50 nM, 25 nM, and 12.5 nM of recombinant viral protein/s were prepared in 1× or 2×Kinetic Buffer. Reference sensors were generated by applying VEGF₁₆₅ over a blank Anti-hIgG Fc biosensors (no molecules). The association and dissociation steps were 300 seconds each. The data were analyzed using the Octet analysis software with 1:1 or 2:1 model fit applied which reports a dissociation constant K_{D} (M).

[0585] To assess the binding of the molecules to VEGF₁₆s: BLI binding studies using the Octet red 96 system were conducted. Briefly, the constructs were immobilized on Anti-Human Fc Capture (AHC) biosensors and interrogated for binding to recombinant VEGF₁₆S that had been commercially sourced. Using BLI technology, the binding to VEGF₁₆₅ was interrogated using SEQ ID NOs: 122, 154, and 209 for binding affinity (equilibrium binding constant, K_{D}) in the monovalent format.

[0586] Results

[0587] The constructs binding VEGF₁₆₅ with single nanomolar to sub-nanomolar affinity displays the natural occurring interaction between the neuropilin domains and the natural ligand. See table below.

TABLE 39
Results of VEGF₁₆₅ binding assay.

| SEQ ID NO. | VEGF₁₆₅ Binding K_{D} (M) |
|---|---|
| 122 | 6.3E−10 |
| 154 | 3.0E−09 |
| 193 | 1.6E−09 |

[0588] The goals of the present example was to determine if the natural ligand VEGF₁₆₅ binds canonical neuropilin binding domains present in present invention's constructs. From the foregoing results, the following conclusions can be made: VEGF₁₆s binds to construct molecules containing neuropilin domains in-line with published literature on VEGF₁₆₅ and neuropilin interactions; the affinity (K_{D}) of construct molecules to VEGF₁₆S is strong, ranging from single digit nanomolar to sub-nanomolar; and, from the data presented here, the construct molecules maintain the established interaction of VEGF₁₆₅ and neuropilin domains and help establish the therapeutic potential for a platform that uses natural occurring interactions to fight viral diseases.

[0589] The present invention is not to be limited in scope by the specific embodiments described herein. Indeed, various modifications of the invention in addition to those described herein will become apparent to those skilled in the art from the foregoing description and the accompanying figures. Such modifications are intended to fall within the scope of the appended claims. It is further to be understood that all values are approximate, and are provided for description.

The application's sequence listing, which the Patent Office published only in electronic form, follows.

SEQUENCE LISTING (209 sequences)

SEQ ID NO: 1 - protein, 923 aa, Artificial Sequence
  NRP1 Full-length
MERGLPLLCAVLALVLAPAGAFRNDKCGDTIKIESPGYLTSPGYPHSYHPSEKCEWLIQAPDPYQRIMINFNPHFDLEDRDCKYDYVEVFDGENENGHFRGKFCGKIAPPPVVSSGPFLFIKFVSDYETHGAGFSIRYEIFKRGPECSQNYTTPSGVIKSPGFPEKYPNSLECTYIVFVPKMSEIILEFESFDLEPDSNPPGGMFCRYDRLEIWDGFPDVGPHIGRYCGQKTPGRIRSSSGILSMVFYTDSAIAKEGFSANYSVLQSSVSEDFKCMEALGMESGEIHSDQITASSQYSTNWSAERSRLNYPENGWTPGEDSYREWIQVDLGLLRFVTAVGTQGAISKETKKKYYVKTYKIDVSSNGEDWITIKEGNKPVLFQGNTNPTDVVVAVFPKPLITRFVRIKPATWETGISMRFEVYGCKITDYPCSGMLGMVSGLISDSQITSSNQGDRNWMPENIRLVTSRSGWALPPAPHSYINEWLQIDLGEEKIVRGIIIQGGKHRENKVFMRKFKIGYSNNGSDWKMIMDDSKRKAKSFEGNNNYDTPELRTFPALSTRFIRIYPERATHGGLGLRMELLGCEVEAPTAGPTTPNGNLVDECDDDQANCHSGTGDDFQLTGGTTVLATEKPTVIDSTIQSEFPTYGFNCEFGWGSHKTFCHWEHDNHVQLKWSVLTSKTGPIQDHTGDGNFIYSQADENQKGKVARLVSPVVYSQNSAHCMTFWYHMSGSHVGTLRVKLRYQKPEEYDQLVWMAIGHQGDHWKEGRVLLHKSLKLYQVIFEGEIGKGNLGGIAVDDISINNHISQEDCAKPADLDKKNPEIKIDETGSTPGYEGEGEGDKNISRKPGNVLKTLDPILITIIAMSALGVLLGAVCGVVLYCACWHNGMSERNLSALENYNFELVDGVKLKKDKLNTQSTYSEA

SEQ ID NO: 2 - protein, 926 aa, Artificial Sequence
  NRP2 Full-length
MDMFPLTWVFLALYFSRHQVRGQPDPPCGGRLNSKDAGYITSPGYPQDYPSHQNCEWIVYAPEPNQKIVLNFNPHFEIEKHDCKYDFIEIRDGDSESADLLGKHCGNIAPPTIISSGSMLYIKFTSDYARQGAGFSLRYEIFKTGSEDCSKNFTSPNGTIESPGFPEKYPHNLDCTFTILAKPKMEIILQFLIFDLEHDPLQVGEGDCKYDWLDIWDGIPHVGPLIGKYCGTKTPSELRSSTGILSLTFHTDMAVAKDGFSARYYLVHQEPLENFQCNVPLGMESGRIANEQISASSTYSDGRWTPQQSRLHGDDNGWTPNLDSNKEYLQVDLRFLTMLTAIATQGAISRETQNGYYVKSYKLEVSTNGEDWMVYRHGKNHKVFQANNDATEVVLNKLHAPLLTRFVRIRPQTWHSGIALRLELFGCRVTDAPCSNMLGMLSGLIADSQISASSTQEYLWSPSAARLVSSRSGWFPRIPQAQPGEEWLQVDLGTPKTVKGVIIQGARGGDSITAVEARAFVRKFKVSYSLNGKDWEYIQDPRTQQPKLFEGNMHYDTPDIRRFDPIPAQYVRVYPERWSPAGIGMRLEVLGCDWTDSKPTVETLGPTVKSEETTTPYPTEEEATECGENCSFEDDKDLQLPSGFNCNFDFLEEPCGWMYDHAKWLRTTWASSSSPNDRTFPDDRNFLRLQSDSQREGQYARLISPPVHLPRSPVCMEFQYQATGGRGVALQVVREASQESKLLWVIREDQGGEWKHGRIILPSYDMEYQIVFEGVIGKGRSGEIAIDDIRISTDVPLENCMEPISAFAVDIPEIHEREGYEDEIDDEYEVDWSNSSSATSGSGAPSTDKEKSWLYTLDPILITIIAMSSLGVLLGATCAGLLLYCTCSYSGLSSRSCTTLENYNFELYDGLKHKVKMNHQKCCSEA

SEQ ID NO: 3 - protein, 150 aa, Artificial Sequence
  NRP1 (b1)
CMEALGMESGEIHSDQITASSQYSTNWSAERSRLNYPENGWTPGEDSYREWIQVDLGLLRFVTAVGTQGAISKETKKKYYVKTYKIDVSSNGEDWITIKEGNKPVLFQGNTNPTDVVVAVFPKPLITRFVRIKPATWETGISMRFEVYGC

SEQ ID NO: 4 - protein, 150 aa, Artificial Sequence
  NRP1 (b1) - E319A
CMEALGMESGEIHSDQITASSQYSTNWSAERSRLNYPENGWTPGADSYREWIQVDLGLLRFVTAVGTQGAISKETKKKYYVKTYKIDVSSNGEDWITIKEGNKPVLFQGNTNPTDVVVAVFPKPLITRFVRIKPATWETGISMRFEVYGC

SEQ ID NO: 5 - protein, 150 aa, Artificial Sequence
  NRP1 (b1) - K351A
CMEALGMESGEIHSDQITASSQYSTNWSAERSRLNYPENGWTPGEDSYREWIQVDLGLLRFVTAVGTQGAISKETKAKYYVKTYKIDVSSNGEDWITIKEGNKPVLFQGNTNPTDVVVAVFPKPLITRFVRIKPATWETGISMRFEVYGC

SEQ ID NO: 6 - protein, 150 aa, Artificial Sequence
  NRP1 (b1) - Y297A/S346A/Y353A
CMEALGMESGEIHSDQITASSQASTNWSAERSRLNYPENGWTPGEDSYREWIQVDLGLLRFVTAVGTQGAIAKETKKKAYVKTYKIDVSSNGEDWITIKEGNKPVLFQGNTNPTDVVVAVFPKPLITRFVRIKPATWETGISMRFEVYGC

SEQ ID NO: 7 - protein, 309 aa, Artificial Sequence
  NRP1 (b1b2)
CMEALGMESGEIHSDQITASSQYSTNWSAERSRLNYPENGWTPGEDSYREWIQVDLGLLRFVTAVGTQGAISKETKKKYYVKTYKIDVSSNGEDWITIKEGNKPVLFQGNTNPTDVVVAVFPKPLITRFVRIKPATWETGISMRFEVYGCKITDYPCSGMLGMVSGLISDSQITSSNQGDRNWMPENIRLVTSRSGWALPPAPHSYINEWLQIDLGEEKIVRGIIIQGGKHRENKVFMRKFKIGYSNNGSDWKMIMDDSKRKAKSFEGNNNYDTPELRTFPALSTRFIRIYPERATHGGLGLRMELLGC

SEQ ID NO: 8 - protein, 309 aa, Artificial Sequence
  NRP1 (b1b2) - E319A
CMEALGMESGEIHSDQITASSQYSTNWSAERSRLNYPENGWTPGADSYREWIQVDLGLLRFVTAVGTQGAISKETKKKYYVKTYKIDVSSNGEDWITIKEGNKPVLFQGNTNPTDVVVAVFPKPLITRFVRIKPATWETGISMRFEVYGCKITDYPCSGMLGMVSGLISDSQITSSNQGDRNWMPENIRLVTSRSGWALPPAPHSYINEWLQIDLGEEKIVRGIIIQGGKHRENKVFMRKFKIGYSNNGSDWKMIMDDSKRKAKSFEGNNNYDTPELRTFPALSTRFIRIYPERATHGGLGLRMELLGC

SEQ ID NO: 9 - protein, 309 aa, Artificial Sequence
  NRP1 (b1b2) - K351A
CMEALGMESGEIHSDQITASSQYSTNWSAERSRLNYPENGWTPGEDSYREWIQVDLGLLRFVTAVGTQGAISKETKAKYYVKTYKIDVSSNGEDWITIKEGNKPVLFQGNTNPTDVVVAVFPKPLITRFVRIKPATWETGISMRFEVYGCKITDYPCSGMLGMVSGLISDSQITSSNQGDRNWMPENIRLVTSRSGWALPPAPHSYINEWLQIDLGEEKIVRGIIIQGGKHRENKVFMRKFKIGYSNNGSDWKMIMDDSKRKAKSFEGNNNYDTPELRTFPALSTRFIRIYPERATHGGLGLRMELLGC

SEQ ID NO: 10 - protein, 309 aa, Artificial Sequence
  NRP1 (b1b2) - Y297A/S346A/Y353A
CMEALGMESGEIHSDQITASSQASTNWSAERSRLNYPENGWTPGEDSYREWIQVDLGLLRFVTAVGTQGAIAKETKKKAYVKTYKIDVSSNGEDWITIKEGNKPVLFQGNTNPTDVVVAVFPKPLITRFVRIKPATWETGISMRFEVYGCKITDYPCSGMLGMVSGLISDSQITSSNQGDRNWMPENIRLVTSRSGWALPPAPHSYINEWLQIDLGEEKIVRGIIIQGGKHRENKVFMRKFKIGYSNNGSDWKMIMDDSKRKAKSFEGNNNYDTPELRTFPALSTRFIRIYPERATHGGLGLRMELLGC

SEQ ID NO: 11 - protein, 151 aa, Artificial Sequence
  NRP2 (b1)
CNVPLGMESGRIANEQISASSTYSDGRWTPQQSRLHGDDNGWTPNLDSNKEYLQVDLRFLTMLTAIATQGAISRETQNGYYVKSYKLEVSTNGEDWMVYRHGKNHKVFQANNDATEVVLNKLHAPLLTRFVRIRPQTWHSGIALRLELFGC

SEQ ID NO: 12 - protein, 151 aa, Artificial Sequence
  NRP2 (b1) - Y297A/S346A/Y353A
CNVPLGMESGRIANEQISASSTASDGRWTPQQSRLHGDDNGWTPNLDSNKEYLQVDLRFLTMLTAIATQGAIARETQNGAYVKSYKLEVSTNGEDWMVYRHGKNHKVFQANNDATEVVLNKLHAPLLTRFVRIRPQTWHSGIALRLELFGC

SEQ ID NO: 13 - protein, 316 aa, Artificial Sequence
  NRP2 (b1b2)
CNVPLGMESGRIANEQISASSTYSDGRWTPQQSRLHGDDNGWTPNLDSNKEYLQVDLRFLTMLTAIATQGAISRETQNGYYVKSYKLEVSTNGEDWMVYRHGKNHKVFQANNDATEVVLNKLHAPLLTRFVRIRPQTWHSGIALRLELFGCRVTDAPCSNMLGMLSGLIADSQISASSTQEYLWSPSAARLVSSRSGWFPRIPQAQPGEEWLQVDLGTPKTVKGVIIQGARGGDSITAVEARAFVRKFKVSYSLNGKDWEYIQDPRTQQPKLFEGNMHYDTPDIRRFDPIPAQYVRVYPERWSPAGIGMRLEVLGC

SEQ ID NO: 14 - protein, 316 aa, Artificial Sequence
  NRP2 (b1b2) - Y297A/S346A/Y353A
CNVPLGMESGRIANEQISASSTASDGRWTPQQSRLHGDDNGWTPNLDSNKEYLQVDLRFLTMLTAIATQGAIARETQNGAYVKSYKLEVSTNGEDWMVYRHGKNHKVFQANNDATEVVLNKLHAPLLTRFVRIRPQTWHSGIALRLELFGCRVTDAPCSNMLGMLSGLIADSQISASSTQEYLWSPSAARLVSSRSGWFPRIPQAQPGEEWLQVDLGTPKTVKGVIIQGARGGDSITAVEARAFVRKFKVSYSLNGKDWEYIQDPRTQQPKLFEGNMHYDTPDIRRFDPIPAQYVRVYPERWSPAGIGMRLEVLGC

SEQ ID NO: 15 - protein, 622 aa, Artificial Sequence
  NRP1 (b1b1)-(G4S)2-(b1b1)
CMEALGMESGEIHSDQITASSQYSTNWSAERSRLNYPENGWTPGEDSYREWIQVDLGLLRFVTAVGTQGAISKETKKKYYVKTYKIDVSSNGEDWITIKEGNKPVLFQGNTNPTDVVVAVFPKPLITRFVRIKPATWETGISMRFEVYGCKITDYPCMEALGMESGEIHSDQITASSQYSTNWSAERSRLNYPENGWTPGEDSYREWIQVDLGLLRFVTAVGTQGAISKETKKKYYVKTYKIDVSSNGEDWITIKEGNKPVLFQGNTNPTDVVVAVFPKPLITRFVRIKPATWETGISMRFEVYGCGGGGSGGGGSCMEALGMESGEIHSDQITASSQYSTNWSAERSRLNYPENGWTPGEDSYREWIQVDLGLLRFVTAVGTQGAISKETKKKYYVKTYKIDVSSNGEDWITIKEGNKPVLFQGNTNPTDVVVAVFPKPLITRFVRIKPATWETGISMRFEVYGCKITDYPCMEALGMESGEIHSDQITASSQYSTNWSAERSRLNYPENGWTPGEDSYREWIQVDLGLLRFVTAVGTQGAISKETKKKYYVKTYKIDVSSNGEDWITIKEGNKPVLFQGNTNPTDVVVAVFPKPLITRFVRIKPATWETGISMRFEVYGC

SEQ ID NO: 16 - protein, 628 aa, Artificial Sequence
  NRP1 (b1b2)- (G4S)2-(b1b2)
CMEALGMESGEIHSDQITASSQYSTNWSAERSRLNYPENGWTPGEDSYREWIQVDLGLLRFVTAVGTQGAISKETKKKYYVKTYKIDVSSNGEDWITIKEGNKPVLFQGNTNPTDVVVAVFPKPLITRFVRIKPATWETGISMRFEVYGCKITDYPCSGMLGMVSGLISDSQITSSNQGDRNWMPENIRLVTSRSGWALPPAPHSYINEWLQIDLGEEKIVRGIIIQGGKHRENKVFMRKFKIGYSNNGSDWKMIMDDSKRKAKSFEGNNNYDTPELRTFPALSTRFIRIYPERATHGGLGLRMELLGCGGGGSGGGGSCMEALGMESGEIHSDQITASSQYSTNWSAERSRLNYPENGWTPGEDSYREWIQVDLGLLRFVTAVGTQGAISKETKKKYYVKTYKIDVSSNGEDWITIKEGNKPVLFQGNTNPTDVVVAVFPKPLITRFVRIKPATWETGISMRFEVYGCKITDYPCSGMLGMVSGLISDSQITSSNQGDRNWMPENIRLVTSRSGWALPPAPHSYINEWLQIDLGEEKIVRGIIIQGGKHRENKVFMRKFKIGYSNNGSDWKMIMDDSKRKAKSFEGNNNYDTPELRTFPALSTRFIRIYPERATHGGLGLRMELLGC

SEQ ID NO: 17 - protein, 628 aa, Artificial Sequence
  NRP1 (b1b2)- (G4S)2 -(b1b2) with b1(E319A)
CMEALGMESGEIHSDQITASSQYSTNWSAERSRLNYPENGWTPGADSYREWIQVDLGLLRFVTAVGTQGAISKETKKKYYVKTYKIDVSSNGEDWITIKEGNKPVLFQGNTNPTDVVVAVFPKPLITRFVRIKPATWETGISMRFEVYGCKITDYPCSGMLGMVSGLISDSQITSSNQGDRNWMPENIRLVTSRSGWALPPAPHSYINEWLQIDLGEEKIVRGIIIQGGKHRENKVFMRKFKIGYSNNGSDWKMIMDDSKRKAKSFEGNNNYDTPELRTFPALSTRFIRIYPERATHGGLGLRMELLGCGGGGSGGGGSCMEALGMESGEIHSDQITASSQYSTNWSAERSRLNYPENGWTPGADSYREWIQVDLGLLRFVTAVGTQGAISKETKKKYYVKTYKIDVSSNGEDWITIKEGNKPVLFQGNTNPTDVVVAVFPKPLITRFVRIKPATWETGISMRFEVYGCKITDYPCSGMLGMVSGLISDSQITSSNQGDRNWMPENIRLVTSRSGWALPPAPHSYINEWLQIDLGEEKIVRGIIIQGGKHRENKVFMRKFKIGYSNNGSDWKMIMDDSKRKAKSFEGNNNYDTPELRTFPALSTRFIRIYPERATHGGLGLRMELLGC

SEQ ID NO: 18 - protein, 628 aa, Artificial Sequence
  NRP1 (b1b2)- (G4S)2-(b1b2) with b1(K351A)
CMEALGMESGEIHSDQITASSQYSTNWSAERSRLNYPENGWTPGEDSYREWIQVDLGLLRFVTAVGTQGAISKETKAKYYVKTYKIDVSSNGEDWITIKEGNKPVLFQGNTNPTDVVVAVFPKPLITRFVRIKPATWETGISMRFEVYGCKITDYPCSGMLGMVSGLISDSQITSSNQGDRNWMPENIRLVTSRSGWALPPAPHSYINEWLQIDLGEEKIVRGIIIQGGKHRENKVFMRKFKIGYSNNGSDWKMIMDDSKRKAKSFEGNNNYDTPELRTFPALSTRFIRIYPERATHGGLGLRMELLGCGGGGSGGGGSCMEALGMESGEIHSDQITASSQYSTNWSAERSRLNYPENGWTPGEDSYREWIQVDLGLLRFVTAVGTQGAISKETKAKYYVKTYKIDVSSNGEDWITIKEGNKPVLFQGNTNPTDVVVAVFPKPLITRFVRIKPATWETGISMRFEVYGCKITDYPCSGMLGMVSGLISDSQITSSNQGDRNWMPENIRLVTSRSGWALPPAPHSYINEWLQIDLGEEKIVRGIIIQGGKHRENKVFMRKFKIGYSNNGSDWKMIMDDSKRKAKSFEGNNNYDTPELRTFPALSTRFIRIYPERATHGGLGLRMELLGC

SEQ ID NO: 19 - protein, 628 aa, Artificial Sequence
  NRP1 (b1b2)-(G4S)2-(b1b2) with (Y297A/S346A/Y353A)
CMEALGMESGEIHSDQITASSQASTNWSAERSRLNYPENGWTPGEDSYREWIQVDLGLLRFVTAVGTQGAIAKETKKKAYVKTYKIDVSSNGEDWITIKEGNKPVLFQGNTNPTDVVVAVFPKPLITRFVRIKPATWETGISMRFEVYGCKITDYPCSGMLGMVSGLISDSQITSSNQGDRNWMPENIRLVTSRSGWALPPAPHSYINEWLQIDLGEEKIVRGIIIQGGKHRENKVFMRKFKIGYSNNGSDWKMIMDDSKRKAKSFEGNNNYDTPELRTFPALSTRFIRIYPERATHGGLGLRMELLGCGGGGSGGGGSCMEALGMESGEIHSDQITASSQASTNWSAERSRLNYPENGWTPGEDSYREWIQVDLGLLRFVTAVGTQGAIAKETKKKAYVKTYKIDVSSNGEDWITIKEGNKPVLFQGNTNPTDVVVAVFPKPLITRFVRIKPATWETGISMRFEVYGCKITDYPCSGMLGMVSGLISDSQITSSNQGDRNWMPENIRLVTSRSGWALPPAPHSYINEWLQIDLGEEKIVRGIIIQGGKHRENKVFMRKFKIGYSNNGSDWKMIMDDSKRKAKSFEGNNNYDTPELRTFPALSTRFIRIYPERATHGGLGLRMELLGC

SEQ ID NO: 20 - protein, 624 aa, Artificial Sequence
  NRP2 (b1b1)-(G4S)2-(b1b1)
CNVPLGMESGRIANEQISASSTYSDGRWTPQQSRLHGDDNGWTPNLDSNKEYLQVDLRFLTMLTAIATQGAISRETQNGYYVKSYKLEVSTNGEDWMVYRHGKNHKVFQANNDATEVVLNKLHAPLLTRFVRIRPQTWHSGIALRLELFGCRVTDACNVPLGMESGRIANEQISASSTYSDGRWTPQQSRLHGDDNGWTPNLDSNKEYLQVDLRFLTMLTAIATQGAISRETQNGYYVKSYKLEVSTNGEDWMVYRHGKNHKVFQANNDATEVVLNKLHAPLLTRFVRIRPQTWHSGIALRLELFGCGGGGSGGGGSCNVPLGMESGRIANEQISASSTYSDGRWTPQQSRLHGDDNGWTPNLDSNKEYLQVDLRFLTMLTAIATQGAISRETQNGYYVKSYKLEVSTNGEDWMVYRHGKNHKVFQANNDATEVVLNKLHAPLLTRFVRIRPQTWHSGIALRLELFGCRVTDACNVPLGMESGRIANEQISASSTYSDGRWTPQQSRLHGDDNGWTPNLDSNKEYLQVDLRFLTMLTAIATQGAISRETQNGYYVKSYKLEVSTNGEDWMVYRHGKNHKVFQANNDATEVVLNKLHAPLLTRFVRIRPQTWHSGIALRLELFGC

SEQ ID NO: 21 - protein, 642 aa, Artificial Sequence
  NRP2 (b1b2)-(G4S)2-(b1b2)
CNVPLGMESGRIANEQISASSTYSDGRWTPQQSRLHGDDNGWTPNLDSNKEYLQVDLRFLTMLTAIATQGAISRETQNGYYVKSYKLEVSTNGEDWMVYRHGKNHKVFQANNDATEVVLNKLHAPLLTRFVRIRPQTWHSGIALRLELFGCRVTDAPCSNMLGMLSGLIADSQISASSTQEYLWSPSAARLVSSRSGWFPRIPQAQPGEEWLQVDLGTPKTVKGVIIQGARGGDSITAVEARAFVRKFKVSYSLNGKDWEYIQDPRTQQPKLFEGNMHYDTPDIRRFDPIPAQYVRVYPERWSPAGIGMRLEVLGCGGGGSGGGGSCNVPLGMESGRIANEQISASSTYSDGRWTPQQSRLHGDDNGWTPNLDSNKEYLQVDLRFLTMLTAIATQGAISRETQNGYYVKSYKLEVSTNGEDWMVYRHGKNHKVFQANNDATEVVLNKLHAPLLTRFVRIRPQTWHSGIALRLELFGCRVTDAPCSNMLGMLSGLIADSQISASSTQEYLWSPSAARLVSSRSGWFPRIPQAQPGEEWLQVDLGTPKTVKGVIIQGARGGDSITAVEARAFVRKFKVSYSLNGKDWEYIQDPRTQQPKLFEGNMHYDTPDIRRFDPIPAQYVRVYPERWSPAGIGMRLEVLGC

SEQ ID NO: 22 - protein, 642 aa, Artificial Sequence
  NRP2 (b1b2)-(G4S)2-(b1b2) with (Y297A/S346A/Y353A)
CNVPLGMESGRIANEQISASSTASDGRWTPQQSRLHGDDNGWTPNLDSNKEYLQVDLRFLTMLTAIATQGAIARETQNGAYVKSYKLEVSTNGEDWMVYRHGKNHKVFQANNDATEVVLNKLHAPLLTRFVRIRPQTWHSGIALRLELFGCRVTDAPCSNMLGMLSGLIADSQISASSTQEYLWSPSAARLVSSRSGWFPRIPQAQPGEEWLQVDLGTPKTVKGVIIQGARGGDSITAVEARAFVRKFKVSYSLNGKDWEYIQDPRTQQPKLFEGNMHYDTPDIRRFDPIPAQYVRVYPERWSPAGIGMRLEVLGCGGGGSGGGGSCNVPLGMESGRIANEQISASSTASDGRWTPQQSRLHGDDNGWTPNLDSNKEYLQVDLRFLTMLTAIATQGAIARETQNGAYVKSYKLEVSTNGEDWMVYRHGKNHKVFQANNDATEVVLNKLHAPLLTRFVRIRPQTWHSGIALRLELFGCRVTDAPCSNMLGMLSGLIADSQISASSTQEYLWSPSAARLVSSRSGWFPRIPQAQPGEEWLQVDLGTPKTVKGVIIQGARGGDSITAVEARAFVRKFKVSYSLNGKDWEYIQDPRTQQPKLFEGNMHYDTPDIRRFDPIPAQYVRVYPERWSPAGIGMRLEVLGC

SEQ ID NO: 23 - protein, 232 aa, Artificial Sequence
  IgG1 WT
EPKSCDKTHTCPPCPAPELLGGPSVFLFPPKPKDTLMISRTPEVTCVVVDVSHEDPEVKFNWYVDGVEVHNAKTKPREEQYNSTYRVVSVLTVLHQDWLNGKEYKCKVSNKALPAPIEKTISKAKGQPREPQVYTLPPSRDELTKNQVSLTCLVKGFYPSDIAVEWESNGQPENNYKTTPPVLDSDGSFFLYSKLTVDKSRWQQGNVFSCSVMHEALHNHYTQKSLSLSPGK

SEQ ID NO: 24 - protein, 232 aa, Artificial Sequence
  IgG1 (T307A/E380A/N434A) --> Increased FcRn binding
EPKSCDKTHTCPPCPAPELLGGPSVFLFPPKPKDTLMISRTPEVTCVVVDVSHEDPEVKFNWYVDGVEVHNAKTKPREEQYNSTYRVVSVLAVLHQDWLNGKEYKCKVSNKALPAPIEKTISKAKGQPREPQVYTLPPSRDELTKNQVSLTCLVKGFYPSDIAVAWESNGQPENNYKTTPPVLDSDGSFFLYSKLTVDKSRWQQGNVFSCSVMHEALHAHYTQKSLSLSPGK

SEQ ID NO: 25 - protein, 232 aa, Artificial Sequence; identical to SEQ ID NO: 24
  IgG1 (N297A) --> No ADCC

SEQ ID NO: 26 - protein, 232 aa, Artificial Sequence
  IgG1 (L324A/L325A) --> LALA mutation (removes Fc gamma receptor binding)
EPKSCDKTHTCPPCPAPEAAGGPSVFLFPPKPKDTLMISRTPEVTCVVVDVSHEDPEVKFNWYVDGVEVHNAKTKPREEQYNSTYRVVSVLTVLHQDWLNGKEYKCKVSNKALPAPIEKTISKAKGQPREPQVYTLPPSRDELTKNQVSLTCLVKGFYPSDIAVEWESNGQPENNYKTTPPVLDSDGSFFLYSKLTVDKSRWQQGNVFSCSVMHEALHNHYTQKSLSLSPGK

SEQ ID NO: 27 - protein, 232 aa, Artificial Sequence
  IgG1 (N297A/T307A/E380A/N434A) --> Increased FcRn binding with No ADCC
EPKSCDKTHTCPPCPAPELLGGPSVFLFPPKPKDTLMISRTPEVTCVVVDVSHEDPEVKFNWYVDGVEVHNAKTKPREEQYASTYRVVSVLAVLHQDWLNGKEYKCKVSNKALPAPIEKTISKAKGQPREPQVYTLPPSRDELTKNQVSLTCLVKGFYPSDIAVAWESNGQPENNYKTTPPVLDSDGSFFLYSKLTVDKSRWQQGNVFSCSVMHEALHAHYTQKSLSLSPGK

SEQ ID NO: 28 - protein, 232 aa, Artificial Sequence
  IgG1 (L324A/L325A/T307A/E380A/N434A) --> Increased FcRn binding with LALA mutation
EPKSCDKTHTCPPCPAPEAAGGPSVFLFPPKPKDTLMISRTPEVTCVVVDVSHEDPEVKFNWYVDGVEVHNAKTKPREEQYNSTYRVVSVLAVLHQDWLNGKEYKCKVSNKALPAPIEKTISKAKGQPREPQVYTLPPSRDELTKNQVSLTCLVKGFYPSDIAVAWESNGQPENNYKTTPPVLDSDGSFFLYSKLTVDKSRWQQGNVFSCSVMHEALHAHYTQKSLSLSPGK

SEQ ID NO: 29 - protein, 228 aa, Artificial Sequence
  IgG2 (T250Q, M428L) --> Increased FcRn binding
ERKCCVECPPCPAPPVAGPSVFLFPPKPKDQLMISRTPEVTCVVVDVSHEDPEVQFNWYVDGVEVHNAKTKPREEQFNSTFRVVSVLTVVHQDWLNGKEYKCKVSNKGLPAPIEKTISKTKGQPREPQVYTLPPSREEMTKNQVSLTCLVKGFYPSDIAVEWESNGQPENNYKTTPPMLDSDGSFFLYSKLTVDKSRWQQGNVFSCSVLHEALHNHYTQKSLSLSPGK

SEQ ID NO: 30 - protein, 228 aa, Artificial Sequence
  IgG2 WT
ERKCCVECPPCPAPPVAGPSVFLFPPKPKDTLMISRTPEVTCVVVDVSHEDPEVQFNWYVDGVEVHNAKTKPREEQFNSTFRVVSVLTVVHQDWLNGKEYKCKVSNKGLPAPIEKTISKTKGQPREPQVYTLPPSREEMTKNQVSLTCLVKGFYPSDIAVEWESNGQPENNYKTTPPMLDSDGSFFLYSKLTVDKSRWQQGNVFSCSVMHEALHNHYTQKSLSLSPGK

SEQ ID NO: 31 - protein, 229 aa, Artificial Sequence
  IgG4 WT
ESKYGPPCPSCPAPEFLGGPSVFLFPPKPKDTLMISRTPEVTCVVVDVSQEDPEVQFNWYVDGVEVHNAKTKPREEQFNSTYRVVSVLTVLHQDWLNGKEYKCKVSNKGLPSSIEKTISKAKGQPREPQVYTLPPSQEEMTKNQVSLTCLVKGFYPSDIAVEWESNGQPENNYKTTPPVLDSDGSFFLYSRLTVDKSRWQEGNVFSCSVMHEALHNHYTQKSLSLSLGK

SEQ ID NO: 32 - protein, 555 aa, Artificial Sequence [sequence omitted]

SEQ ID NO: 33 - protein, 598 aa, Artificial Sequence
  Soluble ACE-2
QSTIEEQAKTFLDKFNHEAEDLFYQSSLASWNYNTNITEENVQNMNNAGDKWSAFLKEQSTLAQMYPLQEIQNLTVKLQLQALQQNGSSVLSEDKSKRLNTILNTMSTIYSTGKVCNPDNPQECLLLEPGLNEIMANSLDYNERLWAWESWRSEVGKQLRPLYEEYVVLKNEMARANHYEDYGDYWRGDYEVNGVDGYDYSRGQLIEDVEHTFEEIKPLYEHLHAYVRAKLMNAYPSYISPIGCLPAHLLGDMWGRFWTNLYSLTVPFGQKPNIDVTDAMVDQAWDAQRIFKEAEKFFVSVGLPNMTQGFWENSMLTDPGNVQKAVCHPTAWDLGKGDFRILMCTKVTMDDFLTAHHEMGHIQYDMAYAAQPFLLRNGANEGFHEAVGEIMSLSAATPKHLKSIGLLSPDFQEDNETEINFLLKQALTIVGTLPFTYMLEKWRWMVFKGEIPKDQWMKKWWEMKREIVGVVEPVPHDETYCDPASLFHVSNDYSFIRYYTRTLYQFQFQEALCQAAKHEGPLHKCDISNSTEAGQKLFNMLRLGKSEPWTLALENVVGAKNMNVRPLLNYFEPLFTWLKDQNKNSFVGWSTDWSPYAD

SEQ ID NO: 34 - protein, 23 aa, Artificial Sequence
  Monomeric ACE2-1 minimal
EEQAKTFLDKFNHEAEDLFYQSS

SEQ ID NO: 35 - protein, 68 aa, Artificial Sequence
  Monomeric ACE2-1 minimal
IEEQAKTFLDKFNHEAEDLFYQSSLASWNYNTNITEENVQNMNNAGDKWSAFLKEQSTLAQMYPLQEI

SEQ ID NO: 36 - protein, 60 aa, Artificial Sequence
  Monomeric ACE2-1 Motif
  MISC_FEATURE (23)..(54): Xaa at positions 24 to 53 may be any one of Gly, Ala, Ser, Ile, Leu, Val, or absent.
EEQAKTFLDKFNHEAEDLFYQSSXXXXXXXXXXXXXXXXXXXXXXXXXXXXXXLGKGDFR

SEQ ID NO: 37 - protein, 107 aa, Artificial Sequence
  Monomeric ACE2-1 Motif
  MISC_FEATURE (68)..(99): Xaa at positions 69 to 98 may be any one of Gly, Ala, Ser, Ile, Leu, Val, or absent.
IEEQAKTFLDKFNHEAEDLFYQSSLASWNYNTNITEENVQNMNNAGDKWSAFLKEQSTLAQMYPLQEIXXXXXXXXXXXXXXXXXXXXXXXXXXXXXXWDLGKGDFR

SEQ ID NO: 38 - protein, 31 aa, Artificial Sequence
  Monomeric ACE2-1
EEQAKTFLDKFNHEAEDLFYQSSGLGKGDFR

SEQ ID NO: 39 - protein, 77 aa, Artificial Sequence
  Monomeric ACE2-2
IEEQAKTFLDKFNHEAEDLFYQSSLASWNYNTNITEENVQNMNNAGDKWSAFLKEQSTLAQMYPLQEIWDLGKGDFR

SEQ ID NO: 40 - protein, 72 aa, Artificial Sequence
  ACE2-1
EEQAKTFLDKFNHEAEDLFYQSSGLGKGDFRGGGGSGGGGSEEQAKTFLDKFNHEAEDLFYQSSGLGKGDFR

SEQ ID NO: 41 - protein, 164 aa, Artificial Sequence
  ACE2-2
IEEQAKTFLDKFNHEAEDLFYQSSLASWNYNTNITEENVQNMNNAGDKWSAFLKEQSTLAQMYPLQEIWDLGKGDFRGGGGSGGGGSIEEQAKTFLDKFNHEAEDLFYQSSLASWNYNTNITEENVQNMNNAGDKWSAFLKEQSTLAQMYPLQEIWDLGKGDFR

SEQ ID NO: 42 - protein, 72 aa, Artificial Sequence
  ACE2-3
EEQAKTWLDKFNHEAEDLFYQSSGLGKGDFRGGGGSGGGGSEEQAKTWLDKFNHEAEDLFYQSSGLGKGDFR

SEQ ID NO: 43 - protein, 164 aa, Artificial Sequence
  ACE2-4
IEEQAKTWLDKFNHEAEDLFYQSSLASWNYNTNITEENVQNMNNAGDKWSAFLKEQSTLAQMYPLQEIWDLGKGDFRGGGGSGGGGSIEEQAKTWLDKFNHEAEDLFYQSSLASWNYNTNITEENVQNMNNAGDKWSAFLKEQSTLAQMYPLQEIWDLGKGDFR

SEQ ID NO: 44 - protein, 164 aa, Artificial Sequence
  ACE2-5
IEEQAKTFLAKFNHEAEDLFYQSSLASWNYNTNITEENVQNMNNAGDKWSAFLKEQSTLAQMYPLQEIWDLGKGDFRGGGGSGGGGSIEEQAKTFLAKFNHEAEDLFYQSSLASWNYNTNITEENVQNMNNAGDKWSAFLKEQSTLAQMYPLQEIWDLGKGDFR

SEQ ID NO: 45 - protein, 164 aa, Artificial Sequence
  ACE2-6
IEEQAKTFLDKFNHEAEDLFYQSSLASWNYNTNITEENVQNMNNAGDKWSAFLKEQSTTAQMYPLQEIWDLGKGDFRGGGGSGGGGSIEEQAKTFLDKFNHEAEDLFYQSSLASWNYNTNITEENVQNMNNAGDKWSAFLKEQSTTAQMYPLQEIWDLGKGDFR

SEQ ID NO: 46 - protein, 10 aa, Artificial Sequence
  (G4S)2 Linker
GGGGSGGGGS

SEQ ID NO: 47 - protein, 6 aa, Artificial Sequence
  NRP1 B1 linker
KITDYP

SEQ ID NO: 48 - protein, 6 aa, Artificial Sequence
  NRP2 B1 linker
RVTDAP

SEQ ID NO: 49 - protein, 4 aa, Artificial Sequence
  NRP1 B1 linker
EDFK

SEQ ID NO: 50 - protein, 4 aa, Artificial Sequence
  NRP2 B1 linker
ENFQ

SEQ ID NO: 51 - protein, 10 aa, Artificial Sequence
  (G4A)2 Linker
GGGGAGGGGA

SEQ ID NO: 52 - protein, 10 aa, Artificial Sequence
  (GA)5 Linker
GAGAGAGAGA

SEQ ID NO: 53 - protein, 19 aa, Artificial Sequence
  Signal Sequence Domain
MGWSCIILFLVATATGVHS

SEQ ID NO: 54 - protein, 831 aa, Artificial Sequence
  IgG1 Wt Fc ? (G4S)2-Full length ACE2
TCPPCPAPELLGGPSVFLFPPKPKDTLMISRTPEVTCVVVDVSHEDPEVKFNWYVDGVEVHNAKTKPREEQYNSTYRVVSVLTVLHQDWLNGKEYKCKVSNKALPAPIEKTISKAKGQPREPQVYTLPPSRDELTKNQVSLTCLVKGFYPSDIAVEWESNGQPENNYKTTPPVLDSDGSFFLYSKLTVDKSRWQQGNVFSCSVMHEALHNHYTQKSLSLSPGKGGGGSGGGGSQSTIEEQAKTFLDKFNHEAEDLFYQSSLASWNYNTNITEENVQNMNNAGDKWSAFLKEQSTLAQMYPLQEIQNLTVKLQLQALQQNGSSVLSEDKSKRLNTILNTMSTIYSTGKVCNPDNPQECLLLEPGLNEIMANSLDYNERLWAWESWRSEVGKQLRPLYEEYVVLKNEMARANHYEDYGDYWRGDYEVNGVDGYDYSRGQLIEDVEHTFEEIKPLYEHLHAYVRAKLMNAYPSYISPIGCLPAHLLGDMWGRFWTNLYSLTVPFGQKPNIDVTDAMVDQAWDAQRIFKEAEKFFVSVGLPNMTQGFWENSMLTDPGNVQKAVCHPTAWDLGKGDFRILMCTKVTMDDFLTAHHEMGHIQYDMAYAAQPFLLRNGANEGFHEAVGEIMSLSAATPKHLKSIGLLSPDFQEDNETEINFLLKQALTIVGTLPFTYMLEKWRWMVFKGEIPKDQWMKKWWEMKREIVGVVEPVPHDETYCDPASLFHVSNDYSFIRYYTRTLYQFQFQEALCQAAKHEGPLHKCDISNSTEAGQKLFNMLRLGKSEPWTLALENVVGAKNMNVRPLLNYFEPLFTWLKDQNKNSFVGWSTDWSPYAD

SEQ ID NO: 55 - protein, 305 aa, Artificial Sequence
  IgG1 Wt Fc ? (G4S)2-Ace2-1
TCPPCPAPELLGGPSVFLFPPKPKDTLMISRTPEVTCVVVDVSHEDPEVKFNWYVDGVEVHNAKTKPREEQYNSTYRVVSVLTVLHQDWLNGKEYKCKVSNKALPAPIEKTISKAKGQPREPQVYTLPPSRDELTKNQVSLTCLVKGFYPSDIAVEWESNGQPENNYKTTPPVLDSDGSFFLYSKLTVDKSRWQQGNVFSCSVMHEALHNHYTQKSLSLSPGKGGGGSGGGGSEEQAKTFLDKFNHEAEDLFYQSSGLGKGDFRGGGGSGGGGSEEQAKTFLDKFNHEAEDLFYQSSGLGKGDFR

SEQ ID NO: 56 - protein, 397 aa, Artificial Sequence
  IgG1 Wt Fc ? (G4S)2-Ace2-1
TCPPCPAPELLGGPSVFLFPPKPKDTLMISRTPEVTCVVVDVSHEDPEVKFNWYVDGVEVHNAKTKPREEQYNSTYRVVSVLTVLHQDWLNGKEYKCKVSNKALPAPIEKTISKAKGQPREPQVYTLPPSRDELTKNQVSLTCLVKGFYPSDIAVEWESNGQPENNYKTTPPVLDSDGSFFLYSKLTVDKSRWQQGNVFSCSVMHEALHNHYTQKSLSLSPGKGGGGSGGGGSIEEQAKTFLDKFNHEAEDLFYQSSLASWNYNTNITEENVQNMNNAGDKWSAFLKEQSTLAQMYPLQEIWDLGKGDFRGGGGSGGGGSIEEQAKTFLDKFNHEAEDLFYQSSLASWNYNTNITEENVQNMNNAGDKWSAFLKEQSTLAQMYPLQEIWDLGKGDFR

SEQ ID NO: 57 - protein, 637 aa, Artificial Sequence
  Neuropilin-Immunoglobulin-ACE2 Construct No. 4
EEQAKTFLDKFNHEAEDLFYQSSGLGKGDFRGGGGSGGGGSEEQAKTFLDKFNHEAEDLFYQSSGLGKGDFRGGGGSGGGGSEPKSCDKTHTCPPCPAPELLGGPSVFLFPPKPKDTLMISRTPEVTCVVVDVSHEDPEVKFNWYVDGVEVHNAKTKPREEQYNSTYRVVSVLTVLHQDWLNGKEYKCKVSNKALPAPIEKTISKAKGQPREPQVYTLPPSRDELTKNQVSLTCLVKGFYPSDIAVEWESNGQPENNYKTTPPVLDSDGSFFLYSKLTVDKSRWQQGNVFSCSVMHEALHNHYTQKSLSLSPGKGGGGSGGGGSCMEALGMESGEIHSDQITASSQYSTNWSAERSRLNYPENGWTPGEDSYREWIQVDLGLLRFVTAVGTQGAISKETKKKYYVKTYKIDVSSNGEDWITIKEGNKPVLFQGNTNPTDVVVAVFPKPLITRFVRIKPATWETGISMRFEVYGCKITDYPCSGMLGMVSGLISDSQITSSNQGDRNWMPENIRLVTSRSGWALPPAPHSYINEWLQIDLGEEKIVRGIIIQGGKHRENKVFMRKFKIGYSNNGSDWKMIMDDSKRKAKSFEGNNNYDTPELRTFPALSTRFIRIYPERATHGGLGLRMELLGCEVEA

SEQ ID NO: 58 - protein, 729 aa, Artificial Sequence
  Neuropilin-Immunoglobulin-ACE2 Construct No. 5
IEEQAKTFLDKFNHEAEDLFYQSSLASWNYNTNITEENVQNMNNAGDKWSAFLKEQSTLAQMYPLQEIWDLGKGDFRGGGGSGGGGSIEEQAKTFLDKFNHEAEDLFYQSSLASWNYNTNITEENVQNMNNAGDKWSAFLKEQSTLAQMYPLQEIWDLGKGDFRGGGGSGGGGSEPKSCDKTHTCPPCPAPELLGGPSVFLFPPKPKDTLMISRTPEVTCVVVDVSHEDPEVKFNWYVDGVEVHNAKTKPREEQYNSTYRVVSVLTVLHQDWLNGKEYKCKVSNKALPAPIEKTISKAKGQPREPQVYTLPPSRDELTKNQVSLTCLVKGFYPSDIAVEWESNGQPENNYKTTPPVLDSDGSFFLYSKLTVDKSRWQQGNVFSCSVMHEALHNHYTQKSLSLSPGKGGGGSGGGGSCMEALGMESGEIHSDQITASSQYSTNWSAERSRLNYPENGWTPGEDSYREWIQVDLGLLRFVTAVGTQGAISKETKKKYYVKTYKIDVSSNGEDWITIKEGNKPVLFQGNTNPTDVVVAVFPKPLITRFVRIKPATWETGISMRFEVYGCKITDYPCSGMLGMVSGLISDSQITSSNQGDRNWMPENIRLVTSRSGWALPPAPHSYINEWLQIDLGEEKIVRGIIIQGGKHRENKVFMRKFKIGYSNNGSDWKMIMDDSKRKAKSFEGNNNYDTPELRTFPALSTRFIRIYPERATHGGLGLRMELLGCEVEA

SEQ ID NO: 59 - protein, 637 aa, Artificial Sequence
  Neuropilin-Immunoglobulin-ACE2 Construct No. 6
EEQAKTWLDKFNHEAEDLFYQSSGLGKGDFRGGGGSGGGGSEEQAKTWLDKFNHEAEDLFYQSSGLGKGDFRGGGGSGGGGSEPKSCDKTHTCPPCPAPELLGGPSVFLFPPKPKDTLMISRTPEVTCVVVDVSHEDPEVKFNWYVDGVEVHNAKTKPREEQYNSTYRVVSVLTVLHQDWLNGKEYKCKVSNKALPAPIEKTISKAKGQPREPQVYTLPPSRDELTKNQVSLTCLVKGFYPSDIAVEWESNGQPENNYKTTPPVLDSDGSFFLYSKLTVDKSRWQQGNVFSCSVMHEALHNHYTQKSLSLSPGKGGGGSGGGGSCMEALGMESGEIHSDQITASSQYSTNWSAERSRLNYPENGWTPGEDSYREWIQVDLGLLRFVTAVGTQGAISKETKKKYYVKTYKIDVSSNGEDWITIKEGNKPVLFQGNTNPTDVVVAVFPKPLITRFVRIKPATWETGISMRFEVYGCKITDYPCSGMLGMVSGLISDSQITSSNQGDRNWMPENIRLVTSRSGWALPPAPHSYINEWLQIDLGEEKIVRGIIIQGGKHRENKVFMRKFKIGYSNNGSDWKMIMDDSKRKAKSFEGNNNYDTPELRTFPALSTRFIRIYPERATHGGLGLRMELLGCEVEA

SEQ ID NO: 60 - protein, 729 aa, Artificial Sequence
  Neuropilin-Immunoglobulin-ACE2 Construct No. 7
IEEQAKTWLDKFNHEAEDLFYQSSLASWNYNTNITEENVQNMNNAGDKWSAFLKEQSTLAQMYPLQEIWDLGKGDFRGGGGSGGGGSIEEQAKTWLDKFNHEAEDLFYQSSLASWNYNTNITEENVQNMNNAGDKWSAFLKEQSTLAQMYPLQEIWDLGKGDFRGGGGSGGGGSEPKSCDKTHTCPPCPAPELLGGPSVFLFPPKPKDTLMISRTPEVTCVVVDVSHEDPEVKFNWYVDGVEVHNAKTKPREEQYNSTYRVVSVLTVLHQDWLNGKEYKCKVSNKALPAPIEKTISKAKGQPREPQVYTLPPSRDELTKNQVSLTCLVKGFYPSDIAVEWESNGQPENNYKTTPPVLDSDGSFFLYSKLTVDKSRWQQGNVFSCSVMHEALHNHYTQKSLSLSPGKGGGGSGGGGSCMEALGMESGEIHSDQITASSQYSTNWSAERSRLNYPENGWTPGEDSYREWIQVDLGLLRFVTAVGTQGAISKETKKKYYVKTYKIDVSSNGEDWITIKEGNKPVLFQGNTNPTDVVVAVFPKPLITRFVRIKPATWETGISMRFEVYGCKITDYPCSGMLGMVSGLISDSQITSSNQGDRNWMPENIRLVTSRSGWALPPAPHSYINEWLQIDLGEEKIVRGIIIQGGKHRENKVFMRKFKIGYSNNGSDWKMIMDDSKRKAKSFEGNNNYDTPELRTFPALSTRFIRIYPERATHGGLGLRMELLGCEVEA

SEQ ID NO: 61 - protein, 1048 aa, Artificial Sequence
  Neuropilin-Immunoglobulin-ACE2 Construct No. 8
IEEQAKTFLDKFNHEAEDLFYQSSLASWNYNTNITEENVQNMNNAGDKWSAFLKEQSTLAQMYPLQEIWDLGKGDFRGGGGSGGGGSIEEQAKTFLDKFNHEAEDLFYQSSLASWNYNTNITEENVQNMNNAGDKWSAFLKEQSTLAQMYPLQEIWDLGKGDFRGGGGSGGGGSEPKSCDKTHTCPPCPAPELLGGPSVFLFPPKPKDTLMISRTPEVTCVVVDVSHEDPEVKFNWYVDGVEVHNAKTKPREEQYNSTYRVVSVLTVLHQDWLNGKEYKCKVSNKALPAPIEKTISKAKGQPREPQVYTLPPSRDELTKNQVSLTCLVKGFYPSDIAVEWESNGQPENNYKTTPPVLDSDGSFFLYSKLTVDKSRWQQGNVFSCSVMHEALHNHYTQKSLSLSPGKGGGGSGGGGSCMEALGMESGEIHSDQITASSQYSTNWSAERSRLNYPENGWTPGADSYREWIQVDLGLLRFVTAVGTQGAISKETKKKYYVKTYKIDVSSNGEDWITIKEGNKPVLFQGNTNPTDVVVAVFPKPLITRFVRIKPATWETGISMRFEVYGCKITDYPCSGMLGMVSGLISDSQITSSNQGDRNWMPENIRLVTSRSGWALPPAPHSYINEWLQIDLGEEKIVRGIIIQGGKHRENKVFMRKFKIGYSNNGSDWKMIMDDSKRKAKSFEGNNNYDTPELRTFPALSTRFIRIYPERATHGGLGLRMELLGCGGGGSGGGGSCMEALGMESGEIHSDQITASSQYSTNWSAERSRLNYPENGWTPGADSYREWIQVDLGLLRFVTAVGTQGAISKETKKKYYVKTYKIDVSSNGEDWITIKEGNKPVLFQGNTNPTDVVVAVFPKPLITRFVRIKPATWETGISMRFEVYGCKITDYPCSGMLGMVSGLISDSQITSSNQGDRNWMPENIRLVTSRSGWALPPAPHSYINEWLQIDLGEEKIVRGIIIQGGKHRENKVFMRKFKIGYSNNGSDWKMIMDDSKRKAKSFEGNNNYDTPELRTFPALSTRFIRIYPERATHGGLGLRMELLGCEVEA

SEQ ID NO: 62 - protein, 1048 aa, Artificial Sequence
  Neuropilin-Immunoglobulin-ACE2 Construct No. 9
IEEQAKTWLDKFNHEAEDLFYQSSLASWNYNTNITEENVQNMNNAGDKWSAFLKEQSTLAQMYPLQEIWDLGKGDFRGGGGSGGGGSIEEQAKTWLDKFNHEAEDLFYQSSLASWNYNTNITEENVQNMNNAGDKWSAFLKEQSTLAQMYPLQEIWDLGKGDFRGGGGSGGGGSEPKSCDKTHTCPPCPAPELLGGPSVFLFPPKPKDTLMISRTPEVTCVVVDVSHEDPEVKFNWYVDGVEVHNAKTKPREEQYNSTYRVVSVLTVLHQDWLNGKEYKCKVSNKALPAPIEKTISKAKGQPREPQVYTLPPSRDELTKNQVSLTCLVKGFYPSDIAVEWESNGQPENNYKTTPPVLDSDGSFFLYSKLTVDKSRWQQGNVFSCSVMHEALHNHYTQKSLSLSPGKGGGGSGGGGSCMEALGMESGEIHSDQITASSQYSTNWSAERSRLNYPENGWTPGADSYREWIQVDLGLLRFVTAVGTQGAISKETKKKYYVKTYKIDVSSNGEDWITIKEGNKPVLFQGNTNPTDVVVAVFPKPLITRFVRIKPATWETGISMRFEVYGCKITDYPCSGMLGMVSGLISDSQITSSNQGDRNWMPENIRLVTSRSGWALPPAPHSYINEWLQIDLGEEKIVRGIIIQGGKHRENKVFMRKFKIGYSNNGSDWKMIMDDSKRKAKSFEGNNNYDTPELRTFPALSTRFIRIYPERATHGGLGLRMELLGCGGGGSGGGGSCMEALGMESGEIHSDQITASSQYSTNWSAERSRLNYPENGWTPGADSYREWIQVDLGLLRFVTAVGTQGAISKETKKKYYVKTYKIDVSSNGEDWITIKEGNKPVLFQGNTNPTDVVVAVFPKPLITRFVRIKPATWETGISMRFEVYGCKITDYPCSGMLGMVSGLISDSQITSSNQGDRNWMPENIRLVTSRSGWALPPAPHSYINEWLQIDLGEEKIVRGIIIQGGKHRENKVFMRKFKIGYSNNGSDWKMIMDDSKRKAKSFEGNNNYDTPELRTFPALSTRFIRIYPERATHGGLGLRMELLGCEVEA

SEQ ID NO: 63 - protein, 1048 aa, Artificial Sequence
  Neuropilin-Immunoglobulin-ACE2 Construct No. 10
IEEQAKTFLAKFNHEAEDLFYQSSLASWNYNTNITEENVQNMNNAGDKWSAFLKEQSTLAQMYPLQEIWDLGKGDFRGGGGSGGGGSIEEQAKTFLAKFNHEAEDLFYQSSLASWNYNTNITEENVQNMNNAGDKWSAFLKEQSTLAQMYPLQEIWDLGKGDFRGGGGSGGGGSEPKSCDKTHTCPPCPAPELLGGPSVFLFPPKPKDTLMISRTPEVTCVVVDVSHEDPEVKFNWYVDGVEVHNAKTKPREEQYNSTYRVVSVLTVLHQDWLNGKEYKCKVSNKALPAPIEKTISKAKGQPREPQVYTLPPSRDELTKNQVSLTCLVKGFYPSDIAVEWESNGQPENNYKTTPPVLDSDGSFFLYSKLTVDKSRWQQGNVFSCSVMHEALHNHYTQKSLSLSPGKGGGGSGGGGSCMEALGMESGEIHSDQITASSQYSTNWSAERSRLNYPENGWTPGADSYREWIQVDLGLLRFVTAVGTQGAISKETKKKYYVKTYKIDVSSNGEDWITIKEGNKPVLFQGNTNPTDVVVAVFPKPLITRFVRIKPATWETGISMRFEVYGCKITDYPCSGMLGMVSGLISDSQITSSNQGDRNWMPENIRLVTSRSGWALPPAPHSYINEWLQIDLGEEKIVRGIIIQGGKHRENKVFMRKFKIGYSNNGSDWKMIMDDSKRKAKSFEGNNNYDTPELRTFPALSTRFIRIYPERATHGGLGLRMELLGCGGGGSGGGGSCMEALGMESGEIHSDQITASSQYSTNWSAERSRLNYPENGWTPGADSYREWIQVDLGLLRFVTAVGTQGAISKETKKKYYVKTYKIDVSSNGEDWITIKEGNKPVLFQGNTNPTDVVVAVFPKPLITRFVRIKPATWETGISMRFEVYGCKITDYPCSGMLGMVSGLISDSQITSSNQGDRNWMPENIRLVTSRSGWALPPAPHSYINEWLQIDLGEEKIVRGIIIQGGKHRENKVFMRKFKIGYSNNGSDWKMIMDDSKRKAKSFEGNNNYDTPELRTFPALSTRFIRIYPERATHGGLGLRMELLGCEVEA

SEQ ID NO: 64 - protein, 1048 aa, Artificial Sequence
  Neuropilin-Immunoglobulin-ACE2 Construct No. 11
IEEQAKTFLDKFNHEAEDLFYQSSLASWNYNTNITEENVQNMNNAGDKWSAFLKEQSTTAQMYPLQEIWDLGKGDFRGGGGSGGGGSIEEQAKTFLDKFNHEAEDLFYQSSLASWNYNTNITEENVQNMNNAGDKWSAFLKEQSTTAQMYPLQEIWDLGKGDFRGGGGSGGGGSEPKSCDKTHTCPPCPAPELLGGPSVFLFPPKPKDTLMISRTPEVTCVVVDVSHEDPEVKFNWYVDGVEVHNAKTKPREEQYNSTYRVVSVLTVLHQDWLNGKEYKCKVSNKALPAPIEKTISKAKGQPREPQVYTLPPSRDELTKNQVSLTCLVKGFYPSDIAVEWESNGQPENNYKTTPPVLDSDGSFFLYSKLTVDKSRWQQGNVFSCSVMHEALHNHYTQKSLSLSPGKGGGGSGGGGSCMEALGMESGEIHSDQITASSQYSTNWSAERSRLNYPENGWTPGADSYREWIQVDLGLLRFVTAVGTQGAISKETKKKYYVKTYKIDVSSNGEDWITIKEGNKPVLFQGNTNPTDVVVAVFPKPLITRFVRIKPATWETGISMRFEVYGCKITDYPCSGMLGMVSGLISDSQITSSNQGDRNWMPENIRLVTSRSGWALPPAPHSYINEWLQIDLGEEKIVRGIIIQGGKHRENKVFMRKFKIGYSNNGSDWKMIMDDSKRKAKSFEGNNNYDTPELRTFPALSTRFIRIYPERATHGGLGLRMELLGCGGGGSGGGGSCMEALGMESGEIHSDQITASSQYSTNWSAERSRLNYPENGWTPGADSYREWIQVDLGLLRFVTAVGTQGAISKETKKKYYVKTYKIDVSSNGEDWITIKEGNKPVLFQGNTNPTDVVVAVFPKPLITRFVRIKPATWETGISMRFEVYGCKITDYPCSGMLGMVSGLISDSQITSSNQGDRNWMPENIRLVTSRSGWALPPAPHSYINEWLQIDLGEEKIVRGIIIQGGKHRENKVFMRKFKIGYSNNGSDWKMIMDDSKRKAKSFEGNNNYDTPELRTFPALSTRFIRIYPERATHGGLGLRMELLGCEVEA

SEQ ID NO: 65 - protein, 392 aa, Artificial Sequence
  Immunoglobulin-Neuropilin Construct No. 12
CMEALGMESGEIHSDQITASSQYSTNWSAERSRLNYPENGWTPGEDSYREWIQVDLGLLRFVTAVGTQGAISKETKKKYYVKTYKIDVSSNGEDWITIKEGNKPVLFQGNTNPTDVVVAVFPKPLITRFVRIKPATWETGISMRFEVYGCGGGGSGGGGSEPKSCDKTHTCPPCPAPELLGGPSVFLFPPKPKDTLMISRTPEVTCVVVDVSHEDPEVKFNWYVDGVEVHNAKTKPREEQYNSTYRVVSVLAVLHQDWLNGKEYKCKVSNKALPAPIEKTISKAKGQPREPQVYTLPPSRDELTKNQVSLTCLVKGFYPSDIAVAWESNGQPENNYKTTPPVLDSDGSFFLYSKLTVDKSRWQQGNVFSCSVMHEALHAHYTQKSLSLSPGK

SEQ ID NO: 66 - protein, 551 aa, Artificial Sequence
  Immunoglobulin-Neuropilin Construct No. 13
CMEALGMESGEIHSDQITASSQYSTNWSAERSRLNYPENGWTPGEDSYREWIQVDLGLLRFVTAVGTQGAISKETKKKYYVKTYKIDVSSNGEDWITIKEGNKPVLFQGNTNPTDVVVAVFPKPLITRFVRIKPATWETGISMRFEVYGCKITDYPCSGMLGMVSGLISDSQITSSNQGDRNWMPENIRLVTSRSGWALPPAPHSYINEWLQIDLGEEKIVRGIIIQGGKHRENKVFMRKFKIGYSNNGSDWKMIMDDSKRKAKSFEGNNNYDTPELRTFPALSTRFIRIYPERATHGGLGLRMELLGCGGGGSGGGGSEPKSCDKTHTCPPCPAPELLGGPSVFLFPPKPKDTLMISRTPEVTCVVVDVSHEDPEVKFNWYVDGVEVHNAKTKPREEQYNSTYRVVSVLAVLHQDWLNGKEYKCKVSNKALPAPIEKTISKAKGQPREPQVYTLPPSRDELTKNQVSLTCLVKGFYPSDIAVAWESNGQPENNYKTTPPVLDSDGSFFLYSKLTVDKSRWQQGNVFSCSVMHEALHAHYTQKSLSLSPGK

SEQ ID NO: 67 - protein, 864 aa, Artificial Sequence
  Immunoglobulin-Neuropilin Construct No. 14
CMEALGMESGEIHSDQITASSQYSTNWSAERSRLNYPENGWTPGEDSYREWIQVDLGLLRFVTAVGTQGAISKETKKKYYVKTYKIDVSSNGEDWITIKEGNKPVLFQGNTNPTDVVVAVFPKPLITRFVRIKPATWETGISMRFEVYGCKITDYPCMEALGMESGEIHSDQITASSQYSTNWSAERSRLNYPENGWTPGEDSYREWIQVDLGLLRFVTAVGTQGAISKETKKKYYVKTYKIDVSSNGEDWITIKEGNKPVLFQGNTNPTDVVVAVFPKPLITRFVRIKPATWETGISMRFEVYGCGGGGSGGGGSCMEALGMESGEIHSDQITASSQYSTNWSAERSRLNYPENGWTPGEDSYREWIQVDLGLLRFVTAVGTQGAISKETKKKYYVKTYKIDVSSNGEDWITIKEGNKPVLFQGNTNPTDVVVAVFPKPLITRFVRIKPATWETGISMRFEVYGCKITDYPCMEALGMESGEIHSDQITASSQYSTNWSAERSRLNYPENGWTPGEDSYREWIQVDLGLLRFVTAVGTQGAISKETKKKYYVKTYKIDVSSNGEDWITIKEGNKPVLFQGNTNPTDVVVAVFPKPLITRFVRIKPATWETGISMRFEVYGCGGGGSGGGGSEPKSCDKTHTCPPCPAPELLGGPSVFLFPPKPKDTLMISRTPEVTCVVVDVSHEDPEVKFNWYVDGVEVHNAKTKPREEQYNSTYRVVSVLAVLHQDWLNGKEYKCKVSNKALPAPIEKTISKAKGQPREPQVYTLPPSRDELTKNQVSLTCLVKGFYPSDIAVAWESNGQPENNYKTTPPVLDSDGSFFLYSKLTVDKSRWQQGNVFSCSVMHEALHAHYTQKSLSLSPGK

SEQ ID NO: 68 - protein, 870 aa, Artificial Sequence
  Immunoglobulin-Neuropilin Construct No. 15
CMEALGMESGEIHSDQITASSQYSTNWSAERSRLNYPENGWTPGEDSYREWIQVDLGLLRFVTAVGTQGAISKETKKKYYVKTYKIDVSSNGEDWITIKEGNKPVLFQGNTNPTDVVVAVFPKPLITRFVRIKPATWETGISMRFEVYGCKITDYPCSGMLGMVSGLISDSQITSSNQGDRNWMPENIRLVTSRSGWALPPAPHSYINEWLQIDLGEEKIVRGIIIQGGKHRENKVFMRKFKIGYSNNGSDWKMIMDDSKRKAKSFEGNNNYDTPELRTFPALSTRFIRIYPERATHGGLGLRMELLGCGGGGSGGGGSCMEALGMESGEIHSDQITASSQYSTNWSAERSRLNYPENGWTPGEDSYREWIQVDLGLLRFVTAVGTQGAISKETKKKYYVKTYKIDVSSNGEDWITIKEGNKPVLFQGNTNPTDVVVAVFPKPLITRFVRIKPATWETGISMRFEVYGCKITDYPCSGMLGMVSGLISDSQITSSNQGDRNWMPENIRLVTSRSGWALPPAPHSYINEWLQIDLGEEKIVRGIIIQGGKHRENKVFMRKFKIGYSNNGSDWKMIMDDSKRKAKSFEGNNNYDTPELRTFPALSTRFIRIYPERATHGGLGLRMELLGCGGGGSGGGGSEPKSCDKTHTCPPCPAPELLGGPSVFLFPPKPKDTLMISRTPEVTCVVVDVSHEDPEVKFNWYVDGVEVHNAKTKPREEQYNSTYRVVSVLAVLHQDWLNGKEYKCKVSNKALPAPIEKTISKAKGQPREPQVYTLPPSRDELTKNQVSLTCLVKGFYPSDIAVAWESNGQPENNYKTTPPVLDSDGSFFLYSKLTVDKSRWQQGNVFSCSVMHEALHAHYTQKSLSLSPGK

SEQ ID NO: 69 - protein, 870 aa, Artificial Sequence
  Immunoglobulin-Neuropilin Construct No. 16
CMEALGMESGEIHSDQITASSQYSTNWSAERSRLNYPENGWTPGADSYREWIQVDLGLLRFVTAVGTQGAISKETKKKYYVKTYKIDVSSNGEDWITIKEGNKPVLFQGNTNPTDVVVAVFPKPLITRFVRIKPATWETGISMRFEVYGCKITDYPCSGMLGMVSGLISDSQITSSNQGDRNWMPENIRLVTSRSGWALPPAPHSYINEWLQIDLGEEKIVRGIIIQGGKHRENKVFMRKFKIGYSNNGSDWKMIMDDSKRKAKSFEGNNNYDTPELRTFPALSTRFIRIYPERATHGGLGLRMELLGCGGGGSGGGGSCMEALGMESGEIHSDQITASSQYSTNWSAERSRLNYPENGWTPGADSYREWIQVDLGLLRFVTAVGTQGAISKETKKKYYVKTYKIDVSSNGEDWITIKEGNKPVLFQGNTNPTDVVVAVFPKPLITRFVRIKPATWETGISMRFEVYGCKITDYPCSGMLGMVSGLISDSQITSSNQGDRNWMPENIRLVTSRSGWALPPAPHSYINEWLQIDLGEEKIVRGIIIQGGKHRENKVFMRKFKIGYSNNGSDWKMIMDDSKRKAKSFEGNNNYDTPELRTFPALSTRFIRIYPERATHGGLGLRMELLGCGGGGSGGGGSEPKSCDKTHTCPPCPAPELLGGPSVFLFPPKPKDTLMISRTPEVTCVVVDVSHEDPEVKFNWYVDGVEVHNAKTKPREEQYNSTYRVVSVLAVLHQDWLNGKEYKCKVSNKALPAPIEKTISKAKGQPREPQVYTLPPSRDELTKNQVSLTCLVKGFYPSDIAVAWESNGQPENNYKTTPPVLDSDGSFFLYSKLTVDKSRWQQGNVFSCSVMHEALHAHYTQKSLSLSPGK

SEQ ID NO: 70 - protein, 874 aa, Artificial Sequence
  Immunoglobulin-Neuropilin Construct No. 17
CMEALGMESGEIHSDQITASSQYSTNWSAERSRLNYPENGWTPGADSYREWIQVDLGLLRFVTAVGTQGAISKETKKKYYVKTYKIDVSSNGEDWITIKEGNKPVLFQGNTNPTDVVVAVFPKPLITRFVRIKPATWETGISMRFEVYGCKITDYPCSGMLGMVSGLISDSQITSSNQGDRNWMPENIRLVTSRSGWALPPAPHSYINEWLQIDLGEEKIVRGIIIQGGKHRENKVFMRKFKIGYSNNGSDWKMIMDDSKRKAKSFEGNNNYDTPELRTFPALSTRFIRIYPERATHGGLGLRMELLGCGGGGSGGGGSEPKSCDKTHTCPPCPAPELLGGPSVFLFPPKPKDTLMISRTPEVTCVVVDVSHEDPEVKFNWYVDGVEVHNAKTKPREEQYNSTYRVVSVLAVLHQDWLNGKEYKCKVSNKALPAPIEKTISKAKGQPREPQVYTLPPSRDELTKNQVSLTCLVKGFYPSDIAVAWESNGQPENNYKTTPPVLDSDGSFFLYSKLTVDKSRWQQGNVFSCSVMHEALHAHYTQKSLSLSPGKGGGGSGGGGSCMEALGMESGEIHSDQITASSQYSTNWSAERSRLNYPENGWTPGADSYREWIQVDLGLLRFVTAVGTQGAISKETKKKYYVKTYKIDVSSNGEDWITIKEGNKPVLFQGNTNPTDVVVAVFPKPLITRFVRIKPATWETGISMRFEVYGCKITDYPCSGMLGMVSGLISDSQITSSNQGDRNWMPENIRLVTSRSGWALPPAPHSYINEWLQIDLGEEKIVRGIIIQGGKHRENKVFMRKFKIGYSNNGSDWKMIMDDSKRKAKSFEGNNNYDTPELRTFPALSTRFIRIYPERATHGGLGLRMELLGCEVEA

SEQ ID NO: 71 - protein, 1193 aa, Artificial Sequence
  Immunoglobulin-Neuropilin Construct No. 18
CMEALGMESGEIHSDQITASSQYSTNWSAERSRLNYPENGWTPGADSYREWIQVDLGLLRFVTAVGTQGAISKETKKKYYVKTYKIDVSSNGEDWITIKEGNKPVLFQGNTNPTDVVVAVFPKPLITRFVRIKPATWETGISMRFEVYGCKITDYPCSGMLGMVSGLISDSQITSSNQGDRNWMPENIRLVTSRSGWALPPAPHSYINEWLQIDLGEEKIVRGIIIQGGKHRENKVFMRKFKIGYSNNGSDWKMIMDDSKRKAKSFEGNNNYDTPELRTFPALSTRFIRIYPERATHGGLGLRMELLGCGGGGSGGGGSCMEALGMESGEIHSDQITASSQYSTNWSAERSRLNYPENGWTPGADSYREWIQVDLGLLRFVTAVGTQGAISKETKKKYYVKTYKIDVSSNGEDWITIKEGNKPVLFQGNTNPTDVVVAVFPKPLITRFVRIKPATWETGISMRFEVYGCKITDYPCSGMLGMVSGLISDSQITSSNQGDRNWMPENIRLVTSRSGWALPPAPHSYINEWLQIDLGEEKIVRGIIIQGGKHRENKVFMRKFKIGYSNNGSDWKMIMDDSKRKAKSFEGNNNYDTPELRTFPALSTRFIRIYPERATHGGLGLRMELLGCGGGGSGGGGSEPKSCDKTHTCPPCPAPELLGGPSVFLFPPKPKDTLMISRTPEVTCVVVDVSHEDPEVKFNWYVDGVEVHNAKTKPREEQYNSTYRVVSVLAVLHQDWLNGKEYKCKVSNKALPAPIEKTISKAKGQPREPQVYTLPPSRDELTKNQVSLTCLVKGFYPSDIAVAWESNGQPENNYKTTPPVLDSDGSFFLYSKLTVDKSRWQQGNVFSCSVMHEALHAHYTQKSLSLSPGKGGGGSGGGGSCMEALGMESGEIHSDQITASSQYSTNWSAERSRLNYPENGWTPGADSYREWIQVDLGLLRFVTAVGTQGAISKETKKKYYVKTYKIDVSSNGEDWITIKEGNKPVLFQGNTNPTDVVVAVFPKPLITRFVRIKPATWETGISMRFEVYGCKITDYPCSGMLGMVSGLISDSQITSSNQGDRNWMPENIRLVTSRSGWALPPAPHSYINEWLQIDLGEEKIVRGIIIQGGKHRENKVFMRKFKIGYSNNGSDWKMIMDDSKRKAKSFEGNNNYDTPELRTFPALSTRFIRIYPERATHGGLGLRMELLGCEVEA

SEQ ID NO: 72 - protein, 884 aa, Artificial Sequence
  Immunoglobulin-Neuropilin Construct No. 19
CNVPLGMESGRIANEQISASSTYSDGRWTPQQSRLHGDDNGWTPNLDSNKEYLQVDLRFLTMLTAIATQGAISRETQNGYYVKSYKLEVSTNGEDWMVYRHGKNHKVFQANNDATEVVLNKLHAPLLTRFVRIRPQTWHSGIALRLELFGCRVTDAPCSNMLGMLSGLIADSQISASSTQEYLWSPSAARLVSSRSGWFPRIPQAQPGEEWLQVDLGTPKTVKGVIIQGARGGDSITAVEARAFVRKFKVSYSLNGKDWEYIQDPRTQQPKLFEGNMHYDTPDIRRFDPIPAQYVRVYPERWSPAGIGMRLEVLGCGGGGSGGGGSCNVPLGMESGRIANEQISASSTYSDGRWTPQQSRLHGDDNGWTPNLDSNKEYLQVDLRFLTMLTAIATQGAISRETQNGYYVKSYKLEVSTNGEDWMVYRHGKNHKVFQANNDATEVVLNKLHAPLLTRFVRIRPQTWHSGIALRLELFGCRVTDAPCSNMLGMLSGLIADSQISASSTQEYLWSPSAARLVSSRSGWFPRIPQAQPGEEWLQVDLGTPKTVKGVIIQGARGGDSITAVEARAFVRKFKVSYSLNGKDWEYIQDPRTQQPKLFEGNMHYDTPDIRRFDPIPAQYVRVYPERWSPAGIGMRLEVLGCGGGGSGGGGSEPKSCDKTHTCPPCPAPELLGGPSVFLFPPKPKDTLMISRTPEVTCVVVDVSHEDPEVKFNWYVDGVEVHNAKTKPREEQYNSTYRVVSVLAVLHQDWLNGKEYKCKVSNKALPAPIEKTISKAKGQPREPQVYTLPPSRDELTKNQVSLTCLVKGFYPSDIAVAWESNGQPENNYKTTPPVLDSDGSFFLYSKLTVDKSRWQQGNVFSCSVMHEALHAHYTQKSLSLSPGK

SEQ ID NO: 73 - protein, 870 aa, Artificial Sequence
  Immunoglobulin-Neuropilin Construct No. 20
CMEALGMESGEIHSDQITASSQYSTNWSAERSRLNYPENGWTPGADSYREWIQVDLGLLRFVTAVGTQGAISKETKKKYYVKTYKIDVSSNGEDWITIKEGNKPVLFQGNTNPTDVVVAVFPKPLITRFVRIKPATWETGISMRFEVYGCKITDYPCSGMLGMVSGLISDSQITSSNQGDRNWMPENIRLVTSRSGWALPPAPHSYINEWLQIDLGEEKIVRGIIIQGGKHRENKVFMRKFKIGYSNNGSDWKMIMDDSKRKAKSFEGNNNYDTPELRTFPALSTRFIRIYPERATHGGLGLRMELLGCGGGGSGGGGSCMEALGMESGEIHSDQITASSQYSTNWSAERSRLNYPENGWTPGADSYREWIQVDLGLLRFVTAVGTQGAISKETKKKYYVKTYKIDVSSNGEDWITIKEGNKPVLFQGNTNPTDVVVAVFPKPLITRFVRIKPATWETGISMRFEVYGCKITDYPCSGMLGMVSGLISDSQITSSNQGDRNWMPENIRLVTSRSGWALPPAPHSYINEWLQIDLGEEKIVRGIIIQGGKHRENKVFMRKFKIGYSNNGSDWKMIMDDSKRKAKSFEGNNNYDTPELRTFPALSTRFIRIYPERATHGGLGLRMELLGCGGGGSGGGGSEPKSCDKTHTCPPCPAPELLGGPSVFLFPPKPKDTLMISRTPEVTCVVVDVSHEDPEVKFNWYVDGVEVHNAKTKPREEQYASTYRVVSVLAVLHQDWLNGKEYKCKVSNKALPAPIEKTISKAKGQPREPQVYTLPPSRDELTKNQVSLTCLVKGFYPSDIAVAWESNGQPENNYKTTPPVLDSDGSFFLYSKLTVDKSRWQQGNVFSCSVMHEALHAHYTQKSLSLSPGK

SEQ ID NO: 74 - protein, 874 aa, Artificial Sequence
  Immunoglobulin-Neuropilin Construct No. 21
CMEALGMESGEIHSDQITASSQYSTNWSAERSRLNYPENGWTPGADSYREWIQVDLGLLRFVTAVGTQGAISKETKKKYYVKTYKIDVSSNGEDWITIKEGNKPVLFQGNTNPTDVVVAVFPKPLITRFVRIKPATWETGISMRFEVYGCKITDYPCSGMLGMVSGLISDSQITSSNQGDRNWMPENIRLVTSRSGWALPPAPHSYINEWLQIDLGEEKIVRGIIIQGGKHRENKVFMRKFKIGYSNNGSDWKMIMDDSKRKAKSFEGNNNYDTPELRTFPALSTRFIRIYPERATHGGLGLRMELLGCGGGGSGGGGSEPKSCDKTHTCPPCPAPELLGGPSVFLFPPKPKDTLMISRTPEVTCVVVDVSHEDPEVKFNWYVDGVEVHNAKTKPREEQYASTYRVVSVLAVLHQDWLNGKEYKCKVSNKALPAPIEKTISKAKGQPREPQVYTLPPSRDELTKNQVSLTCLVKGFYPSDIAVAWESNGQPENNYKTTPPVLDSDGSFFLYSKLTVDKSRWQQGNVFSCSVMHEALHAHYTQKSLSLSPGKGGGGSGGGGSCMEALGMESGEIHSDQITASSQYSTNWSAERSRLNYPENGWTPGADSYREWIQVDLGLLRFVTAVGTQGAISKETKKKYYVKTYKIDVSSNGEDWITIKEGNKPVLFQGNTNPTDVVVAVFPKPLITRFVRIKPATWETGISMRFEVYGCKITDYPCSGMLGMVSGLISDSQITSSNQGDRNWMPENIRLVTSRSGWALPPAPHSYINEWLQIDLGEEKIVRGIIIQGGKHRENKVFMRKFKIGYSNNGSDWKMIMDDSKRKAKSFEGNNNYDTPELRTFPALSTRFIRIYPERATHGGLGLRMELLGCEVEA

SEQ ID NO: 75 - protein, 870 aa, Artificial Sequence
  Immunoglobulin-Neuropilin Construct No. 22
CMEALGMESGEIHSDQITASSQYSTNWSAERSRLNYPENGWTPGEDSYREWIQVDLGLLRFVTAVGTQGAISKETKKKYYVKTYKIDVSSNGEDWITIKEGNKPVLFQGNTNPTDVVVAVFPKPLITRFVRIKPATWETGISMRFEVYGCKITDYPCSGMLGMVSGLISDSQITSSNQGDRNWMPENIRLVTSRSGWALPPAPHSYINEWLQIDLGEEKIVRGIIIQGGKHRENKVFMRKFKIGYSNNGSDWKMIMDDSKRKAKSFEGNNNYDTPELRTFPALSTRFIRIYPERATHGGLGLRMELLGCGGGGSGGGGSCMEALGMESGEIHSDQITASSQYSTNWSAERSRLNYPENGWTPGEDSYREWIQVDLGLLRFVTAVGTQGAISKETKKKYYVKTYKIDVSSNGEDWITIKEGNKPVLFQGNTNPTDVVVAVFPKPLITRFVRIKPATWETGISMRFEVYGCKITDYPCSGMLGMVSGLISDSQITSSNQGDRNWMPENIRLVTSRSGWALPPAPHSYINEWLQIDLGEEKIVRGIIIQGGKHRENKVFMRKFKIGYSNNGSDWKMIMDDSKRKAKSFEGNNNYDTPELRTFPALSTRFIRIYPERATHGGLGLRMELLGCGGGGSGGGGSEPKSCDKTHTCPPCPAPELLGGPSVFLFPPKPKDTLMISRTPEVTCVVVDVSHEDPEVKFNWYVDGVEVHNAKTKPREEQYNSTYRVVSVLTVLHQDWLNGKEYKCKVSNKALPAPIEKTISKAKGQPREPQVYTLPPSRDELTKNQVSLTCLVKGFYPSDIAVEWESNGQPENNYKTTPPVLDSDGSFFLYSKLTVDKSRWQQGNVFSCSVMHEALHNHYTQKSLSLSPGK

SEQ ID NO: 76 - protein, 870 aa, Artificial Sequence
  Immunoglobulin-Neuropilin Construct No. 23
CMEALGMESGEIHSDQITASSQASTNWSAERSRLNYPENGWTPGEDSYREWIQVDLGLLRFVTAVGTQGAIAKETKKKAYVKTYKIDVSSNGEDWITIKEGNKPVLFQGNTNPTDVVVAVFPKPLITRFVRIKPATWETGISMRFEVYGCKITDYPCSGMLGMVSGLISDSQITSSNQGDRNWMPENIRLVTSRSGWALPPAPHSYINEWLQIDLGEEKIVRGIIIQGGKHRENKVFMRKFKIGYSNNGSDWKMIMDDSKRKAKSFEGNNNYDTPELRTFPALSTRFIRIYPERATHGGLGLRMELLGCGGGGSGGGGSCMEALGMESGEIHSDQITASSQASTNWSAERSRLNYPENGWTPGEDSYREWIQVDLGLLRFVTAVGTQGAIAKETKKKAYVKTYKIDVSSNGEDWITIKEGNKPVLFQGNTNPTDVVVAVFPKPLITRFVRIKPATWETGISMRFEVYGCKITDYPCSGMLGMVSGLISDSQITSSNQGDRNWMPENIRLVTSRSGWALPPAPHSYINEWLQIDLGEEKIVRGIIIQGGKHRENKVFMRKFKIGYSNNGSDWKMIMDDSKRKAKSFEGNNNYDTPELRTFPALSTRFIRIYPERATHGGLGLRMELLGCGGGGSGGGGSEPKSCDKTHTCPPCPAPELLGGPSVFLFPPKPKDTLMISRTPEVTCVVVDVSHEDPEVKFNWYVDGVEVHNAKTKPREEQYNSTYRVVSVLTVLHQDWLNGKEYKCKVSNKALPAPIEKTISKAKGQPREPQVYTLPPSRDELTKNQVSLTCLVKGFYPSDIAVEWESNGQPENNYKTTPPVLDSDGSFFLYSKLTVDKSRWQQGNVFSCSVMHEALHNHYTQKSLSLSPGK

SEQ ID NO: 77 - protein, 870 aa, Artificial Sequence
  Immunoglobulin-Neuropilin Construct No. 24
CMEALGMESGEIHSDQITASSQYSTNWSAERSRLNYPENGWTPGEDSYREWIQVDLGLLRFVTAVGTQGAISKETKKKYYVKTYKIDVSSNGEDWITIKEGNKPVLFQGNTNPTDVVVAVFPKPLITRFVRIKPATWETGISMRFEVYGCKITDYPCSGMLGMVSGLISDSQITSSNQGDRNWMPENIRLVTSRSGWALPPAPHSYINEWLQIDLGEEKIVRGIIIQGGKHRENKVFMRKFKIGYSNNGSDWKMIMDDSKRKAKSFEGNNNYDTPELRTFPALSTRFIRIYPERATHGGLGLRMELLGCGGGGSGGGGSCMEALGMESGEIHSDQITASSQYSTNWSAERSRLNYPENGWTPGEDSYREWIQVDLGLLRFVTAVGTQGAISKETKKKYYVKTYKIDVSSNGEDWITIKEGNKPVLFQGNTNPTDVVVAVFPKPLITRFVRIKPATWETGISMRFEVYGCKITDYPCSGMLGMVSGLISDSQITSSNQGDRNWMPENIRLVTSRSGWALPPAPHSYINEWLQIDLGEEKIVRGIIIQGGKHRENKVFMRKFKIGYSNNGSDWKMIMDDSKRKAKSFEGNNNYDTPELRTFPALSTRFIRIYPERATHGGLGLRMELLGCGGGGSGGGGSEPKSCDKTHTCPPCPAPELLGGPSVFLFPPKPKDTLMISRTPEVTCVVVDVSHEDPEVKFNWYVDGVEVHNAKTKPREEQYASTYRVVSVLTVLHQDWLNGKEYKCKVSNKALPAPIEKTISKAKGQPREPQVYTLPPSRDELTKNQVSLTCLVKGFYPSDIAVEWESNGQPENNYKTTPPVLDSDGSFFLYSKLTVDKSRWQQGNVFSCSVMHEALHNHYTQKSLSLSPGK

SEQ ID NO: 78 - protein, 870 aa, Artificial Sequence
  Immunoglobulin-Neuropilin Construct No. 25
CMEALGMESGEIHSDQITASSQYSTNWSAERSRLNYPENGWTPGEDSYREWIQVDLGLLRFVTAVGTQGAISKETKKKYYVKTYKIDVSSNGEDWITIKEGNKPVLFQGNTNPTDVVVAVFPKPLITRFVRIKPATWETGISMRFEVYGCKITDYPCSGMLGMVSGLISDSQITSSNQGDRNWMPENIRLVTSRSGWALPPAPHSYINEWLQIDLGEEKIVRGIIIQGGKHRENKVFMRKFKIGYSNNGSDWKMIMDDSKRKAKSFEGNNNYDTPELRTFPALSTRFIRIYPERATHGGLGLRMELLGCGGGGSGGGGSCMEALGMESGEIHSDQITASSQYSTNWSAERSRLNYPENGWTPGEDSYREWIQVDLGLLRFVTAVGTQGAISKETKKKYYVKTYKIDVSSNGEDWITIKEGNKPVLFQGNTNPTDVVVAVFPKPLITRFVRIKPATWETGISMRFEVYGCKITDYPCSGMLGMVSGLISDSQITSSNQGDRNWMPENIRLVTSRSGWALPPAPHSYINEWLQIDLGEEKIVRGIIIQGGKHRENKVFMRKFKIGYSNNGSDWKMIMDDSKRKAKSFEGNNNYDTPELRTFPALSTRFIRIYPERATHGGLGLRMELLGCGGGGSGGGGSEPKSCDKTHTCPPCPAPEAAGGPSVFLFPPKPKDTLMISRTPEVTCVVVDVSHEDPEVKFNWYVDGVEVHNAKTKPREEQYNSTYRVVSVLTVLHQDWLNGKEYKCKVSNKALPAPIEKTISKAKGQPREPQVYTLPPSRDELTKNQVSLTCLVKGFYPSDIAVEWESNGQPENNYKTTPPVLDSDGSFFLYSKLTVDKSRWQQGNVFSCSVMHEALHNHYTQKSLSLSPGK

SEQ ID NO: 79 - protein, 870 aa, Artificial Sequence
  Immunoglobulin-Neuropilin Construct No. 26
CMEALGMESGEIHSDQITASSQYSTNWSAERSRLNYPENGWTPGADSYREWIQVDLGLLRFVTAVGTQGAISKETKKKYYVKTYKIDVSSNGEDWITIKEGNKPVLFQGNTNPTDVVVAVFPKPLITRFVRIKPATWETGISMRFEVYGCKITDYPCSGMLGMVSGLISDSQITSSNQGDRNWMPENIRLVTSRSGWALPPAPHSYINEWLQIDLGEEKIVRGIIIQGGKHRENKVFMRKFKIGYSNNGSDWKMIMDDSKRKAKSFEGNNNYDTPELRTFPALSTRFIRIYPERATHGGLGLRMELLGCGGGGSGGGGSCMEALGMESGEIHSDQITASSQYSTNWSAERSRLNYPENGWTPGADSYREWIQVDLGLLRFVTAVGTQGAISKETKKKYYVKTYKIDVSSNGEDWITIKEGNKPVLFQGNTNPTDVVVAVFPKPLITRFVRIKPATWETGISMRFEVYGCKITDYPCSGMLGMVSGLISDSQITSSNQGDRNWMPENIRLVTSRSGWALPPAPHSYINEWLQIDLGEEKIVRGIIIQGGKHRENKVFMRKFKIGYSNNGSDWKMIMDDSKRKAKSFEGNNNYDTPELRTFPALSTRFIRIYPERATHGGLGLRMELLGCGGGGSGGGGSEPKSCDKTHTCPPCPAPELLGGPSVFLFPPKPKDTLMISRTPEVTCVVVDVSHEDPEVKFNWYVDGVEVHNAKTKPREEQYNSTYRVVSVLTVLHQDWLNGKEYKCKVSNKALPAPIEKTISKAKGQPREPQVYTLPPSRDELTKNQVSLTCLVKGFYPSDIAVEWESNGQPENNYKTTPPVLDSDGSFFLYSKLTVDKSRWQQGNVFSCSVMHEALHNHYTQKSLSLSPGK

SEQ ID NO: 80 - protein, 870 aa, Artificial Sequence
  Immunoglobulin-Neuropilin Construct No. 27
CMEALGMESGEIHSDQITASSQYSTNWSAERSRLNYPENGWTPGADSYREWIQVDLGLLRFVTAVGTQGAISKETKKKYYVKTYKIDVSSNGEDWITIKEGNKPVLFQGNTNPTDVVVAVFPKPLITRFVRIKPATWETGISMRFEVYGCKITDYPCSGMLGMVSGLISDSQITSSNQGDRNWMPENIRLVTSRSGWALPPAPHSYINEWLQIDLGEEKIVRGIIIQGGKHRENKVFMRKFKIGYSNNGSDWKMIMDDSKRKAKSFEGNNNYDTPELRTFPALSTRFIRIYPERATHGGLGLRMELLGCGGGGSGGGGSCMEALGMESGEIHSDQITASSQYSTNWSAERSRLNYPENGWTPGADSYREWIQVDLGLLRFVTAVGTQGAISKETKKKYYVKTYKIDVSSNGEDWITIKEGNKPVLFQGNTNPTDVVVAVFPKPLITRFVRIKPATWETGISMRFEVYGCKITDYPCSGMLGMVSGLISDSQITSSNQGDRNWMPENIRLVTSRSGWALPPAPHSYINEWLQIDLGEEKIVRGIIIQGGKHRENKVFMRKFKIGYSNNGSDWKMIMDDSKRKAKSFEGNNNYDTPELRTFPALSTRFIRIYPERATHGGLGLRMELLGCGGGGSGGGGSEPKSCDKTHTCPPCPAPELLGGPSVFLFPPKPKDTLMISRTPEVTCVVVDVSHEDPEVKFNWYVDGVEVHNAKTKPREEQYASTYRVVSVLTVLHQDWLNGKEYKCKVSNKALPAPIEKTISKAKGQPREPQVYTLPPSRDELTKNQVSLTCLVKGFYPSDIAVEWESNGQPENNYKTTPPVLDSDGSFFLYSKLTVDKSRWQQGNVFSCSVMHEALHNHYTQKSLSLSPGK

SEQ ID NO: 81 - protein, 874 aa, Artificial Sequence
  Immunoglobulin-Neuropilin Construct No. 28
CMEALGMESGEIHSDQITASSQYSTNWSAERSRLNYPENGWTPGEDSYREWIQVDLGLLRFVTAVGTQGAISKETKKKYYVKTYKIDVSSNGEDWITIKEGNKPVLFQGNTNPTDVVVAVFPKPLITRFVRIKPATWETGISMRFEVYGCKITDYPCSGMLGMVSGLISDSQITSSNQGDRNWMPENIRLVTSRSGWALPPAPHSYINEWLQIDLGEEKIVRGIIIQGGKHRENKVFMRKFKIGYSNNGSDWKMIMDDSKRKAKSFEGNNNYDTPELRTFPALSTRFIRIYPERATHGGLGLRMELLGCGGGGSGGGGSEPKSCDKTHTCPPCPAPELLGGPSVFLFPPKPKDTLMISRTPEVTCVVVDVSHEDPEVKFNWYVDGVEVHNAKTKPREEQYNSTYRVVSVLTVLHQDWLNGKEYKCKVSNKALPAPIEKTISKAKGQPREPQVYTLPPSRDELTKNQVSLTCLVKGFYPSDIAVEWESNGQPENNYKTTPPVLDSDGSFFLYSKLTVDKSRWQQGNVFSCSVMHEALHNHYTQKSLSLSPGKGGGGSGGGGSCMEALGMESGEIHSDQITASSQYSTNWSAERSRLNYPENGWTPGEDSYREWIQVDLGLLRFVTAVGTQGAISKETKKKYYVKTYKIDVSSNGEDWITIKEGNKPVLFQGNTNPTDVVVAVFPKPLITRFVRIKPATWETGISMRFEVYGCKITDYPCSGMLGMVSGLISDSQITSSNQGDRNWMPENIRLVTSRSGWALPPAPHSYINEWLQIDLGEEKIVRGIIIQGGKHRENKVFMRKFKIGYSNNGSDWKMIMDDSKRKAKSFEGNNNYDTPELRTFPALSTRFIRIYPERATHGGLGLRMELLGCEVEA

SEQ ID NO: 82 - protein, 870 aa, Artificial Sequence
  Immunoglobulin-Neuropilin Construct No. 29
CMEALGMESGEIHSDQITASSQYSTNWSAERSRLNYPENGWTPGEDSYREWIQVDLGLLRFVTAVGTQGAISKETKAKYYVKTYKIDVSSNGEDWITIKEGNKPVLFQGNTNPTDVVVAVFPKPLITRFVRIKPATWETGISMRFEVYGCKITDYPCSGMLGMVSGLISDSQITSSNQGDRNWMPENIRLVTSRSGWALPPAPHSYINEWLQIDLGEEKIVRGIIIQGGKHRENKVFMRKFKIGYSNNGSDWKMIMDDSKRKAKSFEGNNNYDTPELRTFPALSTRFIRIYPERATHGGLGLRMELLGCGGGGSGGGGSCMEALGMESGEIHSDQITASSQYSTNWSAERSRLNYPENGWTPGEDSYREWIQVDLGLLRFVTAVGTQGAISKETKAKYYVKTYKIDVSSNGEDWITIKEGNKPVLFQGNTNPTDVVVAVFPKPLITRFVRIKPATWETGISMRFEVYGCKITDYPCSGMLGMVSGLISDSQITSSNQGDRNWMPENIRLVTSRSGWALPPAPHSYINEWLQIDLGEEKIVRGIIIQGGKHRENKVFMRKFKIGYSNNGSDWKMIMDDSKRKAKSFEGNNNYDTPELRTFPALSTRFIRIYPERATHGGLGLRMELLGCGGGGSGGGGSEPKSCDKTHTCPPCPAPELLGGPSVFLFPPKPKDTLMISRTPEVTCVVVDVSHEDPEVKFNWYVDGVEVHNAKTKPREEQYASTYRVVSVLAVLHQDWLNGKEYKCKVSNKALPAPIEKTISKAKGQPREPQVYTLPPSRDELTKNQVSLTCLVKGFYPSDIAVAWESNGQPENNYKTTPPVLDSDGSFFLYSKLTVDKSRWQQGNVFSCSVMHEALHAHYTQKSLSLSPGK

SEQ ID NO: 83 - protein, 870 aa, Artificial Sequence
  Immunoglobulin-Neuropilin Construct No. 30
CMEALGMESGEIHSDQITASSQYSTNWSAERSRLNYPENGWTPGEDSYREWIQVDLGLLRFVTAVGTQGAISKETKAKYYVKTYKIDVSSNGEDWITIKEGNKPVLFQGNTNPTDVVVAVFPKPLITRFVRIKPATWETGISMRFEVYGCKITDYPCSGMLGMVSGLISDSQITSSNQGDRNWMPENIRLVTSRSGWALPPAPHSYINEWLQIDLGEEKIVRGIIIQGGKHRENKVFMRKFKIGYSNNGSDWKMIMDDSKRKAKSFEGNNNYDTPELRTFPALSTRFIRIYPERATHGGLGLRMELLGCGGGGSGGGGSCMEALGMESGEIHSDQITASSQYSTNWSAERSRLNYPENGWTPGEDSYREWIQVDLGLLRFVTAVGTQGAISKETKAKYYVKTYKIDVSSNGEDWITIKEGNKPVLFQGNTNPTDVVVAVFPKPLITRFVRIKPATWETGISMRFEVYGCKITDYPCSGMLGMVSGLISDSQITSSNQGDRNWMPENIRLVTSRSGWALPPAPHSYINEWLQIDLGEEKIVRGIIIQGGKHRENKVFMRKFKIGYSNNGSDWKMIMDDSKRKAKSFEGNNNYDTPELRTFPALSTRFIRIYPERATHGGLGLRMELLGCGGGGSGGGGSEPKSCDKTHTCPPCPAPEAAGGPSVFLFPPKPKDTLMISRTPEVTCVVVDVSHEDPEVKFNWYVDGVEVHNAKTKPREEQYNSTYRVVSVLAVLHQDWLNGKEYKCKVSNKALPAPIEKTISKAKGQPREPQVYTLPPSRDELTKNQVSLTCLVKGFYPSDIAVAWESNGQPENNYKTTPPVLDSDGSFFLYSKLTVDKSRWQQGNVFSCSVMHEALHAHYTQKSLSLSPGK

SEQ ID NO: 84 - protein, 870 aa, Artificial Sequence
  Immunoglobulin-Neuropilin Construct No. 31
CMEALGMESGEIHSDQITASSQYSTNWSAERSRLNYPENGWTPGEDSYREWIQVDLGLLRFVTAVGTQGAISKETKKKYYVKTYKIDVSSNGEDWITIKEGNKPVLFQGNTNPTDVVVAVFPKPLITRFVRIKPATWETGISMRFEVYGCKITDYPCSGMLGMVSGLISDSQITSSNQGDRNWMPENIRLVTSRSGWALPPAPHSYINEWLQIDLGEEKIVRGIIIQGGKHRENKVFMRKFKIGYSNNGSDWKMIMDDSKRKAKSFEGNNNYDTPELRTFPALSTRFIRIYPERATHGGLGLRMELLGCGGGGSGGGGSCMEALGMESGEIHSDQITASSQYSTNWSAERSRLNYPENGWTPGEDSYREWIQVDLGLLRFVTAVGTQGAISKETKKKYYVKTYKIDVSSNGEDWITIKEGNKPVLFQGNTNPTDVVVAVFPKPLITRFVRIKPATWETGISMRFEVYGCKITDYPCSGMLGMVSGLISDSQITSSNQGDRNWMPENIRLVTSRSGWALPPAPHSYINEWLQIDLGEEKIVRGIIIQGGKHRENKVFMRKFKIGYSNNGSDWKMIMDDSKRKAKSFEGNNNYDTPELRTFPALSTRFIRIYPERATHGGLGLRMELLGCGGGGSGGGGSEPKSCDKTHTCPPCPAPELLGGPSVFLFPPKPKDTLMISRTPEVTCVVVDVSHEDPEVKFNWYVDGVEVHNAKTKPREEQYASTYRVVSVLAVLHQDWLNGKEYKCKVSNKALPAPIEKTISKAKGQPREPQVYTLPPSRDELTKNQVSLTCLVKGFYPSDIAVAWESNGQPENNYKTTPPVLDSDGSFFLYSKLTVDKSRWQQGNVFSCSVMHEALHAHYTQKSLSLSPGK

SEQ ID NO: 85 - protein, 870 aa, Artificial Sequence
  Immunoglobulin-Neuropilin Construct No. 32
CMEALGMESGEIHSDQITASSQYSTNWSAERSRLNYPENGWTPGEDSYREWIQVDLGLLRFVTAVGTQGAISKETKKKYYVKTYKIDVSSNGEDWITIKEGNKPVLFQGNTNPTDVVVAVFPKPLITRFVRIKPATWETGISMRFEVYGCKITDYPCSGMLGMVSGLISDSQITSSNQGDRNWMPENIRLVTSRSGWALPPAPHSYINEWLQIDLGEEKIVRGIIIQGGKHRENKVFMRKFKIGYSNNGSDWKMIMDDSKRKAKSFEGNNNYDTPELRTFPALSTRFIRIYPERATHGGLGLRMELLGCGGGGSGGGGSCMEALGMESGEIHSDQITASSQYSTNWSAERSRLNYPENGWTPGEDSYREWIQVDLGLLRFVTAVGTQGAISKETKKKYYVKTYKIDVSSNGEDWITIKEGNKPVLFQGNTNPTDVVVAVFPKPLITRFVRIKPATWETGISMRFEVYGCKITDYPCSGMLGMVSGLISDSQITSSNQGDRNWMPENIRLVTSRSGWALPPAPHSYINEWLQIDLGEEKIVRGIIIQGGKHRENKVFMRKFKIGYSNNGSDWKMIMDDSKRKAKSFEGNNNYDTPELRTFPALSTRFIRIYPERATHGGLGLRMELLGCGGGGSGGGGSEPKSCDKTHTCPPCPAPEAAGGPSVFLFPPKPKDTLMISRTPEVTCVVVDVSHEDPEVKFNWYVDGVEVHNAKTKPREEQYNSTYRVVSVLAVLHQDWLNGKEYKCKVSNKALPAPIEKTISKAKGQPREPQVYTLPPSRDELTKNQVSLTCLVKGFYPSDIAVAWESNGQPENNYKTTPPVLDSDGSFFLYSKLTVDKSRWQQGNVFSCSVMHEALHAHYTQKSLSLSPGK

SEQ ID NO: 86 - protein, 870 aa, Artificial Sequence
  Immunoglobulin-Neuropilin Construct No. 33
CMEALGMESGEIHSDQITASSQYSTNWSAERSRLNYPENGWTPGADSYREWIQVDLGLLRFVTAVGTQGAISKETKKKYYVKTYKIDVSSNGEDWITIKEGNKPVLFQGNTNPTDVVVAVFPKPLITRFVRIKPATWETGISMRFEVYGCKITDYPCSGMLGMVSGLISDSQITSSNQGDRNWMPENIRLVTSRSGWALPPAPHSYINEWLQIDLGEEKIVRGIIIQGGKHRENKVFMRKFKIGYSNNGSDWKMIMDDSKRKAKSFEGNNNYDTPELRTFPALSTRFIRIYPERATHGGLGLRMELLGCGGGGSGGGGSCMEALGMESGEIHSDQITASSQYSTNWSAERSRLNYPENGWTPGADSYREWIQVDLGLLRFVTAVGTQGAISKETKKKYYVKTYKIDVSSNGEDWITIKEGNKPVLFQGNTNPTDVVVAVFPKPLITRFVRIKPATWETGISMRFEVYGCKITDYPCSGMLGMVSGLISDSQITSSNQGDRNWMPENIRLVTSRSGWALPPAPHSYINEWLQIDLGEEKIVRGIIIQGGKHRENKVFMRKFKIGYSNNGSDWKMIMDDSKRKAKSFEGNNNYDTPELRTFPALSTRFIRIYPERATHGGLGLRMELLGCGGGGSGGGGSEPKSCDKTHTCPPCPAPEAAGGPSVFLFPPKPKDTLMISRTPEVTCVVVDVSHEDPEVKFNWYVDGVEVHNAKTKPREEQYNSTYRVVSVLAVLHQDWLNGKEYKCKVSNKALPAPIEKTISKAKGQPREPQVYTLPPSRDELTKNQVSLTCLVKGFYPSDIAVAWESNGQPENNYKTTPPVLDSDGSFFLYSKLTVDKSRWQQGNVFSCSVMHEALHAHYTQKSLSLSPGK

SEQ ID NO: 87 - protein, 874 aa, Artificial Sequence
  Immunoglobulin-Neuropilin Construct No. 34
CMEALGMESGEIHSDQITASSQYSTNWSAERSRLNYPENGWTPGADSYREWIQVDLGLLRFVTAVGTQGAISKETKKKYYVKTYKIDVSSNGEDWITIKEGNKPVLFQGNTNPTDVVVAVFPKPLITRFVRIKPATWETGISMRFEVYGCKITDYPCSGMLGMVSGLISDSQITSSNQGDRNWMPENIRLVTSRSGWALPPAPHSYINEWLQIDLGEEKIVRGIIIQGGKHRENKVFMRKFKIGYSNNGSDWKMIMDDSKRKAKSFEGNNNYDTPELRTFPALSTRFIRIYPERATHGGLGLRMELLGCGGGGSGGGGSEPKSCDKTHTCPPCPAPEAAGGPSVFLFPPKPKDTLMISRTPEVTCVVVDVSHEDPEVKFNWYVDGVEVHNAKTKPREEQYNSTYRVVSVLAVLHQDWLNGKEYKCKVSNKALPAPIEKTISKAKGQPREPQVYTLPPSRDELTKNQVSLTCLVKGFYPSDIAVAWESNGQPENNYKTTPPVLDSDGSFFLYSKLTVDKSRWQQGNVFSCSVMHEALHAHYTQKSLSLSPGKGGGGSGGGGSCMEALGMESGEIHSDQITASSQYSTNWSAERSRLNYPENGWTPGADSYREWIQVDLGLLRFVTAVGTQGAISKETKKKYYVKTYKIDVSSNGEDWITIKEGNKPVLFQGNTNPTDVVVAVFPKPLITRFVRIKPATWETGISMRFEVYGCKITDYPCSGMLGMVSGLISDSQITSSNQGDRNWMPENIRLVTSRSGWALPPAPHSYINEWLQIDLGEEKIVRGIIIQGGKHRENKVFMRKFKIGYSNNGSDWKMIMDDSKRKAKSFEGNNNYDTPELRTFPALSTRFIRIYPERATHGGLGLRMELLGCEVEA

SEQ ID NO: 88 - protein, 866 aa, Artificial Sequence
  Immunoglobulin-Neuropilin Construct No. 35
CMEALGMESGEIHSDQITASSQYSTNWSAERSRLNYPENGWTPGEDSYREWIQVDLGLLRFVTAVGTQGAISKETKKKYYVKTYKIDVSSNGEDWITIKEGNKPVLFQGNTNPTDVVVAVFPKPLITRFVRIKPATWETGISMRFEVYGCKITDYPCSGMLGMVSGLISDSQITSSNQGDRNWMPENIRLVTSRSGWALPPAPHSYINEWLQIDLGEEKIVRGIIIQGGKHRENKVFMRKFKIGYSNNGSDWKMIMDDSKRKAKSFEGNNNYDTPELRTFPALSTRFIRIYPERATHGGLGLRMELLGCGGGGSGGGGSCMEALGMESGEIHSDQITASSQYSTNWSAERSRLNYPENGWTPGEDSYREWIQVDLGLLRFVTAVGTQGAISKETKKKYYVKTYKIDVSSNGEDWITIKEGNKPVLFQGNTNPTDVVVAVFPKPLITRFVRIKPATWETGISMRFEVYGCKITDYPCSGMLGMVSGLISDSQITSSNQGDRNWMPENIRLVTSRSGWALPPAPHSYINEWLQIDLGEEKIVRGIIIQGGKHRENKVFMRKFKIGYSNNGSDWKMIMDDSKRKAKSFEGNNNYDTPELRTFPALSTRFIRIYPERATHGGLGLRMELLGCGGGGSGGGGSERKCCVECPPCPAPPVAGPSVFLFPPKPKDQLMISRTPEVTCVVVDVSHEDPEVQFNWYVDGVEVHNAKTKPREEQFNSTFRVVSVLTVVHQDWLNGKEYKCKVSNKGLPAPIEKTISKTKGQPREPQVYTLPPSREEMTKNQVSLTCLVKGFYPSDIAVEWESNGQPENNYKTTPPMLDSDGSFFLYSKLTVDKSRWQQGNVFSCSVLHEALHNHYTQKSLSLSPGK

SEQ ID NO: 89 - protein, 870 aa, Artificial Sequence
  Immunoglobulin-Neuropilin Construct No. 36
CMEALGMESGEIHSDQITASSQYSTNWSAERSRLNYPENGWTPGEDSYREWIQVDLGLLRFVTAVGTQGAISKETKKKYYVKTYKIDVSSNGEDWITIKEGNKPVLFQGNTNPTDVVVAVFPKPLITRFVRIKPATWETGISMRFEVYGCKITDYPCSGMLGMVSGLISDSQITSSNQGDRNWMPENIRLVTSRSGWALPPAPHSYINEWLQIDLGEEKIVRGIIIQGGKHRENKVFMRKFKIGYSNNGSDWKMIMDDSKRKAKSFEGNNNYDTPELRTFPALSTRFIRIYPERATHGGLGLRMELLGCGGGGSGGGGSERKCCVECPPCPAPPVAGPSVFLFPPKPKDQLMISRTPEVTCVVVDVSHEDPEVQFNWYVDGVEVHNAKTKPREEQFNSTFRVVSVLTVVHQDWLNGKEYKCKVSNKGLPAPIEKTISKTKGQPREPQVYTLPPSREEMTKNQVSLTCLVKGFYPSDIAVEWESNGQPENNYKTTPPMLDSDGSFFLYSKLTVDKSRWQQGNVFSCSVLHEALHNHYTQKSLSLSPGKGGGGSGGGGSCMEALGMESGEIHSDQITASSQYSTNWSAERSRLNYPENGWTPGEDSYREWIQVDLGLLRFVTAVGTQGAISKETKKKYYVKTYKIDVSSNGEDWITIKEGNKPVLFQGNTNPTDVVVAVFPKPLITRFVRIKPATWETGISMRFEVYGCKITDYPCSGMLGMVSGLISDSQITSSNQGDRNWMPENIRLVTSRSGWALPPAPHSYINEWLQIDLGEEKIVRGIIIQGGKHRENKVFMRKFKIGYSNNGSDWKMIMDDSKRKAKSFEGNNNYDTPELRTFPALSTRFIRIYPERATHGGLGLRMELLGCEVEA

SEQ ID NO: 90 - protein, 952 aa, Artificial Sequence
  Neuropilin-Immunoglobulin-ACE2 Construct No. 37
CMEALGMESGEIHSDQITASSQYSTNWSAERSRLNYPENGWTPGEDSYREWIQVDLGLLRFVTAVGTQGAISKETKKKYYVKTYKIDVSSNGEDWITIKEGNKPVLFQGNTNPTDVVVAVFPKPLITRFVRIKPATWETGISMRFEVYGCKITDYPCSGMLGMVSGLISDSQITSSNQGDRNWMPENIRLVTSRSGWALPPAPHSYINEWLQIDLGEEKIVRGIIIQGGKHRENKVFMRKFKIGYSNNGSDWKMIMDDSKRKAKSFEGNNNYDTPELRTFPALSTRFIRIYPERATHGGLGLRMELLGCGGGGSGGGGSCMEALGMESGEIHSDQITASSQYSTNWSAERSRLNYPENGWTPGEDSYREWIQVDLGLLRFVTAVGTQGAISKETKKKYYVKTYKIDVSSNGEDWITIKEGNKPVLFQGNTNPTDVVVAVFPKPLITRFVRIKPATWETGISMRFEVYGCKITDYPCSGMLGMVSGLISDSQITSSNQGDRNWMPENIRLVTSRSGWALPPAPHSYINEWLQIDLGEEKIVRGIIIQGGKHRENKVFMRKFKIGYSNNGSDWKMIMDDSKRKAKSFEGNNNYDTPELRTFPALSTRFIRIYPERATHGGLGLRMELLGCGGGGSGGGGSEPKSCDKTHTCPPCPAPELLGGPSVFLFPPKPKDTLMISRTPEVTCVVVDVSHEDPEVKFNWYVDGVEVHNAKTKPREEQYNSTYRVVSVLAVLHQDWLNGKEYKCKVSNKALPAPIEKTISKAKGQPREPQVYTLPPSRDELTKNQVSLTCLVKGFYPSDIAVAWESNGQPENNYKTTPPVLDSDGSFFLYSKLTVDKSRWQQGNVFSCSVMHEALHAHYTQKSLSLSPGKGGGGSGGGGSEEQAKTFLDKFNHEAEDLFYQSSGLGKGDFRGGGGSGGGGSEEQAKTFLDKFNHEAEDLFYQSSGLGKGDFR

SEQ ID NO: 91 - protein, 1044 aa, Artificial Sequence
  Neuropilin-Immunoglobulin-ACE2 Construct No. 38
CMEALGMESGEIHSDQITASSQYSTNWSAERSRLNYPENGWTPGEDSYREWIQVDLGLLRFVTAVGTQGAISKETKKKYYVKTYKIDVSSNGEDWITIKEGNKPVLFQGNTNPTDVVVAVFPKPLITRFVRIKPATWETGISMRFEVYGCKITDYPCSGMLGMVSGLISDSQITSSNQGDRNWMPENIRLVTSRSGWALPPAPHSYINEWLQIDLGEEKIVRGIIIQGGKHRENKVFMRKFKIGYSNNGSDWKMIMDDSKRKAKSFEGNNNYDTPELRTFPALSTRFIRIYPERATHGGLGLRMELLGCGGGGSGGGGSCMEALGMESGEIHSDQITASSQYSTNWSAERSRLNYPENGWTPGEDSYREWIQVDLGLLRFVTAVGTQGAISKETKKKYYVKTYKIDVSSNGEDWITIKEGNKPVLFQGNTNPTDVVVAVFPKPLITRFVRIKPATWETGISMRFEVYGCKITDYPCSGMLGMVSGLISDSQITSSNQGDRNWMPENIRLVTSRSGWALPPAPHSYINEWLQIDLGEEKIVRGIIIQGGKHRENKVFMRKFKIGYSNNGSDWKMIMDDSKRKAKSFEGNNNYDTPELRTFPALSTRFIRIYPERATHGGLGLRMELLGCGGGGSGGGGSEPKSCDKTHTCPPCPAPELLGGPSVFLFPPKPKDTLMISRTPEVTCVVVDVSHEDPEVKFNWYVDGVEVHNAKTKPREEQYNSTYRVVSVLAVLHQDWLNGKEYKCKVSNKALPAPIEKTISKAKGQPREPQVYTLPPSRDELTKNQVSLTCLVKGFYPSDIAVAWESNGQPENNYKTTPPVLDSDGSFFLYSKLTVDKSRWQQGNVFSCSVMHEALHAHYTQKSLSLSPGKGGGGSGGGGSIEEQAKTFLDKFNHEAEDLFYQSSLASWNYNTNITEENVQNMNNAGDKWSAFLKEQSTLAQMYPLQEIWDLGKGDFRGGGGSGGGGSIEEQAKTFLDKFNHEAEDLFYQSSLASWNYNTNITEENVQNMNNAGDKWSAFLKEQSTLAQMYPLQEIWDLGKGDFR

SEQ ID NO: 92 - protein, 952 aa, Artificial Sequence
  Neuropilin-Immunoglobulin-ACE2 Construct No. 39
CMEALGMESGEIHSDQITASSQYSTNWSAERSRLNYPENGWTPGEDSYREWIQVDLGLLRFVTAVGTQGAISKETKKKYYVKTYKIDVSSNGEDWITIKEGNKPVLFQGNTNPTDVVVAVFPKPLITRFVRIKPATWETGISMRFEVYGCKITDYPCSGMLGMVSGLISDSQITSSNQGDRNWMPENIRLVTSRSGWALPPAPHSYINEWLQIDLGEEKIVRGIIIQGGKHRENKVFMRKFKIGYSNNGSDWKMIMDDSKRKAKSFEGNNNYDTPELRTFPALSTRFIRIYPERATHGGLGLRMELLGCGGGGSGGGGSCMEALGMESGEIHSDQITASSQYSTNWSAERSRLNYPENGWTPGEDSYREWIQVDLGLLRFVTAVGTQGAISKETKKKYYVKTYKIDVSSNGEDWITIKEGNKPVLFQGNTNPTDVVVAVFPKPLITRFVRIKPATWETGISMRFEVYGCKITDYPCSGMLGMVSGLISDSQITSSNQGDRNWMPENIRLVTSRSGWALPPAPHSYINEWLQIDLGEEKIVRGIIIQGGKHRENKVFMRKFKIGYSNNGSDWKMIMDDSKRKAKSFEGNNNYDTPELRTFPALSTRFIRIYPERATHGGLGLRMELLGCGGGGSGGGGSEPKSCDKTHTCPPCPAPELLGGPSVFLFPPKPKDTLMISRTPEVTCVVVDVSHEDPEVKFNWYVDGVEVHNAKTKPREEQYNSTYRVVSVLAVLHQDWLNGKEYKCKVSNKALPAPIEKTISKAKGQPREPQVYTLPPSRDELTKNQVSLTCLVKGFYPSDIAVAWESNGQPENNYKTTPPVLDSDGSFFLYSKLTVDKSRWQQGNVFSCSVMHEALHAHYTQKSLSLSPGKGGGGSGGGGSEEQAKTWLDKFNHEAEDLFYQSSGLGKGDFRGGGGSGGGGSEEQAKTWLDKFNHEAEDLFYQSSGLGKGDFR

SEQ ID NO: 93 - protein, 1044 aa, Artificial Sequence
  Neuropilin-Immunoglobulin-ACE2 Construct No. 40
CMEALGMESGEIHSDQITASSQYSTNWSAERSRLNYPENGWTPGEDSYREWIQVDLGLLRFVTAVGTQGAISKETKKKYYVKTYKIDVSSNGEDWITIKEGNKPVLFQGNTNPTDVVVAVFPKPLITRFVRIKPATWETGISMRFEVYGCKITDYPCSGMLGMVSGLISDSQITSSNQGDRNWMPENIRLVTSRSGWALPPAPHSYINEWLQIDLGEEKIVRGIIIQGGKHRENKVFMRKFKIGYSNNGSDWKMIMDDSKRKAKSFEGNNNYDTPELRTFPALSTRFIRIYPERATHGGLGLRMELLGCGGGGSGGGGSCMEALGMESGEIHSDQITASSQYSTNWSAERSRLNYPENGWTPGEDSYREWIQVDLGLLRFVTAVGTQGAISKETKKKYYVKTYKIDVSSNGEDWITIKEGNKPVLFQGNTNPTDVVVAVFPKPLITRFVRIKPATWETGISMRFEVYGCKITDYPCSGMLGMVSGLISDSQITSSNQGDRNWMPENIRLVTSRSGWALPPAPHSYINEWLQIDLGEEKIVRGIIIQGGKHRENKVFMRKFKIGYSNNGSDWKMIMDDSKRKAKSFEGNNNYDTPELRTFPALSTRFIRIYPERATHGGLGLRMELLGCGGGGSGGGGSEPKSCDKTHTCPPCPAPELLGGPSVFLFPPKPKDTLMISRTPEVTCVVVDVSHEDPEVKFNWYVDGVEVHNAKTKPREEQYNSTYRVVSVLAVLHQDWLNGKEYKCKVSNKALPAPIEKTISKAKGQPREPQVYTLPPSRDELTKNQVSLTCLVKGFYPSDIAVAWESNGQPENNYKTTPPVLDSDGSFFLYSKLTVDKSRWQQGNVFSCSVMHEALHAHYTQKSLSLSPGKGGGGSGGGGSIEEQAKTWLDKFNHEAEDLFYQSSLASWNYNTNITEENVQNMNNAGDKWSAFLKEQSTLAQMYPLQEIWDLGKGDFRGGGGSGGGGSIEEQAKTWLDKFNHEAEDLFYQSSLASWNYNTNITEENVQNMNNAGDKWSAFLKEQSTLAQMYPLQEIWDLGKGDFR

SEQ ID NO: 94 - protein, 1044 aa, Artificial Sequence
  Neuropilin-Immunoglobulin-ACE2 Construct No. 41
CMEALGMESGEIHSDQITASSQYSTNWSAERSRLNYPENGWTPGADSYREWIQVDLGLLRFVTAVGTQGAISKETKKKYYVKTYKIDVSSNGEDWITIKEGNKPVLFQGNTNPTDVVVAVFPKPLITRFVRIKPATWETGISMRFEVYGCKITDYPCSGMLGMVSGLISDSQITSSNQGDRNWMPENIRLVTSRSGWALPPAPHSYINEWLQIDLGEEKIVRGIIIQGGKHRENKVFMRKFKIGYSNNGSDWKMIMDDSKRKAKSFEGNNNYDTPELRTFPALSTRFIRIYPERATHGGLGLRMELLGCGGGGSGGGGSCMEALGMESGEIHSDQITASSQYSTNWSAERSRLNYPENGWTPGADSYREWIQVDLGLLRFVTAVGTQGAISKETKKKYYVKTYKIDVSSNGEDWITIKEGNKPVLFQGNTNPTDVVVAVFPKPLITRFVRIKPATWETGISMRFEVYGCKITDYPCSGMLGMVSGLISDSQITSSNQGDRNWMPENIRLVTSRSGWALPPAPHSYINEWLQIDLGEEKIVRGIIIQGGKHRENKVFMRKFKIGYSNNGSDWKMIMDDSKRKAKSFEGNNNYDTPELRTFPALSTRFIRIYPERATHGGLGLRMELLGCGGGGSGGGGSEPKSCDKTHTCPPCPAPELLGGPSVFLFPPKPKDTLMISRTPEVTCVVVDVSHEDPEVKFNWYVDGVEVHNAKTKPREEQYNSTYRVVSVLAVLHQDWLNGKEYKCKVSNKALPAPIEKTISKAKGQPREPQVYTLPPSRDELTKNQVSLTCLVKGFYPSDIAVAWESNGQPENNYKTTPPVLDSDGSFFLYSKLTVDKSRWQQGNVFSCSVMHEALHAHYTQKSLSLSPGKGGGGSGGGGSIEEQAKTFLDKFNHEAEDLFYQSSLASWNYNTNITEENVQNMNNAGDKWSAFLKEQSTLAQMYPLQEIWDLGKGDFRGGGGSGGGGSIEEQAKTFLDKFNHEAEDLFYQSSLASWNYNTNITEENVQNMNNAGDKWSAFLKEQSTLAQMYPLQEIWDLGKGDFR

SEQ ID NO: 95 - protein, 1044 aa, Artificial Sequence
  Neuropilin-Immunoglobulin-ACE2 Construct No. 42
CMEALGMESGEIHSDQITASSQYSTNWSAERSRLNYPENGWTPGADSYREWIQVDLGLLRFVTAVGTQGAISKETKKKYYVKTYKIDVSSNGEDWITIKEGNKPVLFQGNTNPTDVVVAVFPKPLITRFVRIKPATWETGISMRFEVYGCKITDYPCSGMLGMVSGLISDSQITSSNQGDRNWMPENIRLVTSRSGWALPPAPHSYINEWLQIDLGEEKIVRGIIIQGGKHRENKVFMRKFKIGYSNNGSDWKMIMDDSKRKAKSFEGNNNYDTPELRTFPALSTRFIRIYPERATHGGLGLRMELLGCGGGGSGGGGSCMEALGMESGEIHSDQITASSQYSTNWSAERSRLNYPENGWTPGADSYREWIQVDLGLLRFVTAVGTQGAISKETKKKYYVKTYKIDVSSNGEDWITIKEGNKPVLFQGNTNPTDVVVAVFPKPLITRFVRIKPATWETGISMRFEVYGCKITDYPCSGMLGMVSGLISDSQITSSNQGDRNWMPENIRLVTSRSGWALPPAPHSYINEWLQIDLGEEKIVRGIIIQGGKHRENKVFMRKFKIGYSNNGSDWKMIMDDSKRKAKSFEGNNNYDTPELRTFPALSTRFIRIYPERATHGGLGLRMELLGCGGGGSGGGGSEPKSCDKTHTCPPCPAPELLGGPSVFLFPPKPKDTLMISRTPEVTCVVVDVSHEDPEVKFNWYVDGVEVHNAKTKPREEQYNSTYRVVSVLAVLHQDWLNGKEYKCKVSNKALPAPIEKTISKAKGQPREPQVYTLPPSRDELTKNQVSLTCLVKGFYPSDIAVAWESNGQPENNYKTTPPVLDSDGSFFLYSKLTVDKSRWQQGNVFSCSVMHEALHAHYTQKSLSLSPGKGGGGSGGGGSIEEQAKTWLDKFNHEAEDLFYQSSLASWNYNTNITEENVQNMNNAGDKWSAFLKEQSTLAQMYPLQEIWDLGKGDFRGGGGSGGGGSIEEQAKTWLDKFNHEAEDLFYQSSLASWNYNTNITEENVQNMNNAGDKWSAFLKEQSTLAQMYPLQEIWDLGKGDFR

SEQ ID NO: 96 - protein, 1044 aa, Artificial Sequence
  Neuropilin-Immunoglobulin-ACE2 Construct No. 43
CMEALGMESGEIHSDQITASSQYSTNWSAERSRLNYPENGWTPGADSYREWIQVDLGLLRFVTAVGTQGAISKETKKKYYVKTYKIDVSSNGEDWITIKEGNKPVLFQGNTNPTDVVVAVFPKPLITRFVRIKPATWETGISMRFEVYGCKITDYPCSGMLGMVSGLISDSQITSSNQGDRNWMPENIRLVTSRSGWALPPAPHSYINEWLQIDLGEEKIVRGIIIQGGKHRENKVFMRKFKIGYSNNGSDWKMIMDDSKRKAKSFEGNNNYDTPELRTFPALSTRFIRIYPERATHGGLGLRMELLGCGGGGSGGGGSCMEALGMESGEIHSDQITASSQYSTNWSAERSRLNYPENGWTPGADSYREWIQVDLGLLRFVTAVGTQGAISKETKKKYYVKTYKIDVSSNGEDWITIKEGNKPVLFQGNTNPTDVVVAVFPKPLITRFVRIKPATWETGISMRFEVYGCKITDYPCSGMLGMVSGLISDSQITSSNQGDRNWMPENIRLVTSRSGWALPPAPHSYINEWLQIDLGEEKIVRGIIIQGGKHRENKVFMRKFKIGYSNNGSDWKMIMDDSKRKAKSFEGNNNYDTPELRTFPALSTRFIRIYPERATHGGLGLRMELLGCGGGGSGGGGSEPKSCDKTHTCPPCPAPELLGGPSVFLFPPKPKDTLMISRTPEVTCVVVDVSHEDPEVKFNWYVDGVEVHNAKTKPREEQYNSTYRVVSVLAVLHQDWLNGKEYKCKVSNKALPAPIEKTISKAKGQPREPQVYTLPPSRDELTKNQVSLTCLVKGFYPSDIAVAWESNGQPENNYKTTPPVLDSDGSFFLYSKLTVDKSRWQQGNVFSCSVMHEALHAHYTQKSLSLSPGKGGGGSGGGGSIEEQAKTFLAKFNHEAEDLFYQSSLASWNYNTNITEENVQNMNNAGDKWSAFLKEQSTLAQMYPLQEIWDLGKGDFRGGGGSGGGGSIEEQAKTFLAKFNHEAEDLFYQSSLASWNYNTNITEENVQNMNNAGDKWSAFLKEQSTLAQMYPLQEIWDLGKGDFR

SEQ ID NO: 97 - protein, 1044 aa, Artificial Sequence
  Neuropilin-Immunoglobulin-ACE2 Construct No. 44
CMEALGMESGEIHSDQITASSQYSTNWSAERSRLNYPENGWTPGADSYREWIQVDLGLLRFVTAVGTQGAISKETKKKYYVKTYKIDVSSNGEDWITIKEGNKPVLFQGNTNPTDVVVAVFPKPLITRFVRIKPATWETGISMRFEVYGCKITDYPCSGMLGMVSGLISDSQITSSNQGDRNWMPENIRLVTSRSGWALPPAPHSYINEWLQIDLGEEKIVRGIIIQGGKHRENKVFMRKFKIGYSNNGSDWKMIMDDSKRKAKSFEGNNNYDTPELRTFPALSTRFIRIYPERATHGGLGLRMELLGCGGGGSGGGGSCMEALGMESGEIHSDQITASSQYSTNWSAERSRLNYPENGWTPGADSYREWIQVDLGLLRFVTAVGTQGAISKETKKKYYVKTYKIDVSSNGEDWITIKEGNKPVLFQGNTNPTDVVVAVFPKPLITRFVRIKPATWETGISMRFEVYGCKITDYPCSGMLGMVSGLISDSQITSSNQGDRNWMPENIRLVTSRSGWALPPAPHSYINEWLQIDLGEEKIVRGIIIQGGKHRENKVFMRKFKIGYSNNGSDWKMIMDDSKRKAKSFEGNNNYDTPELRTFPALSTRFIRIYPERATHGGLGLRMELLGCGGGGSGGGGSEPKSCDKTHTCPPCPAPELLGGPSVFLFPPKPKDTLMISRTPEVTCVVVDVSHEDPEVKFNWYVDGVEVHNAKTKPREEQYNSTYRVVSVLAVLHQDWLNGKEYKCKVSNKALPAPIEKTISKAKGQPREPQVYTLPPSRDELTKNQVSLTCLVKGFYPSDIAVAWESNGQPENNYKTTPPVLDSDGSFFLYSKLTVDKSRWQQGNVFSCSVMHEALHAHYTQKSLSLSPGKGGGGSGGGGSIEEQAKTFLDKFNHEAEDLFYQSSLASWNYNTNITEENVQNMNNAGDKWSAFLKEQSTTAQMYPLQEIWDLGKGDFRGGGGSGGGGSIEEQAKTFLDKFNHEAEDLFYQSSLASWNYNTNITEENVQNMNNAGDKWSAFLKEQSTTAQMYPLQEIWDLGKGDFR

SEQ ID NO: 98 - protein, 1058 aa, Artificial Sequence
  Neuropilin-Immunoglobulin-ACE2 Construct No. 45
CNVPLGMESGRIANEQISASSTYSDGRWTPQQSRLHGDDNGWTPNLDSNKEYLQVDLRFLTMLTAIATQGAISRETQNGYYVKSYKLEVSTNGEDWMVYRHGKNHKVFQANNDATEVVLNKLHAPLLTRFVRIRPQTWHSGIALRLELFGCRVTDAPCSNMLGMLSGLIADSQISASSTQEYLWSPSAARLVSSRSGWFPRIPQAQPGEEWLQVDLGTPKTVKGVIIQGARGGDSITAVEARAFVRKFKVSYSLNGKDWEYIQDPRTQQPKLFEGNMHYDTPDIRRFDPIPAQYVRVYPERWSPAGIGMRLEVLGCGGGGSGGGGSCNVPLGMESGRIANEQISASSTYSDGRWTPQQSRLHGDDNGWTPNLDSNKEYLQVDLRFLTMLTAIATQGAISRETQNGYYVKSYKLEVSTNGEDWMVYRHGKNHKVFQANNDATEVVLNKLHAPLLTRFVRIRPQTWHSGIALRLELFGCRVTDAPCSNMLGMLSGLIADSQISASSTQEYLWSPSAARLVSSRSGWFPRIPQAQPGEEWLQVDLGTPKTVKGVIIQGARGGDSITAVEARAFVRKFKVSYSLNGKDWEYIQDPRTQQPKLFEGNMHYDTPDIRRFDPIPAQYVRVYPERWSPAGIGMRLEVLGCGGGGSGGGGSEPKSCDKTHTCPPCPAPELLGGPSVFLFPPKPKDTLMISRTPEVTCVVVDVSHEDPEVKFNWYVDGVEVHNAKTKPREEQYNSTYRVVSVLAVLHQDWLNGKEYKCKVSNKALPAPIEKTISKAKGQPREPQVYTLPPSRDELTKNQVSLTCLVKGFYPSDIAVAWESNGQPENNYKTTPPVLDSDGSFFLYSKLTVDKSRWQQGNVFSCSVMHEALHAHYTQKSLSLSPGKGGGGSGGGGSIEEQAKTFLDKFNHEAEDLFYQSSLASWNYNTNITEENVQNMNNAGDKWSAFLKEQSTLAQMYPLQEIWDLGKGDFRGGGGSGGGGSIEEQAKTFLDKFNHEAEDLFYQSSLASWNYNTNITEENVQNMNNAGDKWSAFLKEQSTLAQMYPLQEIWDLGKGDFR

SEQ ID NO: 99 - protein, 952 aa, Artificial Sequence
  Neuropilin-Immunoglobulin-ACE2 Construct No. 46
CMEALGMESGEIHSDQITASSQYSTNWSAERSRLNYPENGWTPGEDSYREWIQVDLGLLRFVTAVGTQGAISKETKKKYYVKTYKIDVSSNGEDWITIKEGNKPVLFQGNTNPTDVVVAVFPKPLITRFVRIKPATWETGISMRFEVYGCKITDYPCSGMLGMVSGLISDSQITSSNQGDRNWMPENIRLVTSRSGWALPPAPHSYINEWLQIDLGEEKIVRGIIIQGGKHRENKVFMRKFKIGYSNNGSDWKMIMDDSKRKAKSFEGNNNYDTPELRTFPALSTRFIRIYPERATHGGLGLRMELLGCGGGGSGGGGSCMEALGMESGEIHSDQITASSQYSTNWSAERSRLNYPENGWTPGEDSYREWIQVDLGLLRFVTAVGTQGAISKETKKKYYVKTYKIDVSSNGEDWITIKEGNKPVLFQGNTNPTDVVVAVFPKPLITRFVRIKPATWETGISMRFEVYGCKITDYPCSGMLGMVSGLISDSQITSSNQGDRNWMPENIRLVTSRSGWALPPAPHSYINEWLQIDLGEEKIVRGIIIQGGKHRENKVFMRKFKIGYSNNGSDWKMIMDDSKRKAKSFEGNNNYDTPELRTFPALSTRFIRIYPERATHGGLGLRMELLGCGGGGSGGGGSEPKSCDKTHTCPPCPAPELLGGPSVFLFPPKPKDTLMISRTPEVTCVVVDVSHEDPEVKFNWYVDGVEVHNAKTKPREEQYNSTYRVVSVLTVLHQDWLNGKEYKCKVSNKALPAPIEKTISKAKGQPREPQVYTLPPSRDELTKNQVSLTCLVKGFYPSDIAVEWESNGQPENNYKTTPPVLDSDGSFFLYSKLTVDKSRWQQGNVFSCSVMHEALHNHYTQKSLSLSPGKGGGGSGGGGSEEQAKTFLDKFNHEAEDLFYQSSGLGKGDFRGGGGSGGGGSEEQAKTFLDKFNHEAEDLFYQSSGLGKGDFR

SEQ ID NO: 100 - protein, 1044 aa, Artificial Sequence
  Neuropilin-Immunoglobulin-ACE2 Construct No. 47
CMEALGMESGEIHSDQITASSQYSTNWSAERSRLNYPENGWTPGEDSYREWIQVDLGLLRFVTAVGTQGAISKETKKKYYVKTYKIDVSSNGEDWITIKEGNKPVLFQGNTNPTDVVVAVFPKPLITRFVRIKPATWETGISMRFEVYGCKITDYPCSGMLGMVSGLISDSQITSSNQGDRNWMPENIRLVTSRSGWALPPAPHSYINEWLQIDLGEEKIVRGIIIQGGKHRENKVFMRKFKIGYSNNGSDWKMIMDDSKRKAKSFEGNNNYDTPELRTFPALSTRFIRIYPERATHGGLGLRMELLGCGGGGSGGGGSCMEALGMESGEIHSDQITASSQYSTNWSAERSRLNYPENGWTPGEDSYREWIQVDLGLLRFVTAVGTQGAISKETKKKYYVKTYKIDVSSNGEDWITIKEGNKPVLFQGNTNPTDVVVAVFPKPLITRFVRIKPATWETGISMRFEVYGCKITDYPCSGMLGMVSGLISDSQITSSNQGDRNWMPENIRLVTSRSGWALPPAPHSYINEWLQIDLGEEKIVRGIIIQGGKHRENKVFMRKFKIGYSNNGSDWKMIMDDSKRKAKSFEGNNNYDTPELRTFPALSTRFIRIYPERATHGGLGLRMELLGCGGGGSGGGGSEPKSCDKTHTCPPCPAPELLGGPSVFLFPPKPKDTLMISRTPEVTCVVVDVSHEDPEVKFNWYVDGVEVHNAKTKPREEQYNSTYRVVSVLTVLHQDWLNGKEYKCKVSNKALPAPIEKTISKAKGQPREPQVYTLPPSRDELTKNQVSLTCLVKGFYPSDIAVEWESNGQPENNYKTTPPVLDSDGSFFLYSKLTVDKSRWQQGNVFSCSVMHEALHNHYTQKSLSLSPGKGGGGSGGGGSIEEQAKTFLDKFNHEAEDLFYQSSLASWNYNTNITEENVQNMNNAGDKWSAFLKEQSTLAQMYPLQEIWDLGKGDFRGGGGSGGGGSIEEQAKTFLDKFNHEAEDLFYQSSLASWNYNTNITEENVQNMNNAGDKWSAFLKEQSTLAQMYPLQEIWDLGKGDFR

SEQ ID NO: 101 - protein, 1044 aa, Artificial Sequence
  Neuropilin-Immunoglobulin-ACE2 Construct No. 48
CMEALGMESGEIHSDQITASSQYSTNWSAERSRLNYPENGWTPGEDSYREWIQVDLGLLRFVTAVGTQGAISKETKKKYYVKTYKIDVSSNGEDWITIKEGNKPVLFQGNTNPTDVVVAVFPKPLITRFVRIKPATWETGISMRFEVYGCKITDYPCSGMLGMVSGLISDSQITSSNQGDRNWMPENIRLVTSRSGWALPPAPHSYINEWLQIDLGEEKIVRGIIIQGGKHRENKVFMRKFKIGYSNNGSDWKMIMDDSKRKAKSFEGNNNYDTPELRTFPALSTRFIRIYPERATHGGLGLRMELLGCGGGGSGGGGSCMEALGMESGEIHSDQITASSQYSTNWSAERSRLNYPENGWTPGEDSYREWIQVDLGLLRFVTAVGTQGAISKETKKKYYVKTYKIDVSSNGEDWITIKEGNKPVLFQGNTNPTDVVVAVFPKPLITRFVRIKPATWETGISMRFEVYGCKITDYPCSGMLGMVSGLISDSQITSSNQGDRNWMPENIRLVTSRSGWALPPAPHSYINEWLQIDLGEEKIVRGIIIQGGKHRENKVFMRKFKIGYSNNGSDWKMIMDDSKRKAKSFEGNNNYDTPELRTFPALSTRFIRIYPERATHGGLGLRMELLGCGGGGSGGGGSEPKSCDKTHTCPPCPAPELLGGPSVFLFPPKPKDTLMISRTPEVTCVVVDVSHEDPEVKFNWYVDGVEVHNAKTKPREEQYASTYRVVSVLTVLHQDWLNGKEYKCKVSNKALPAPIEKTISKAKGQPREPQVYTLPPSRDELTKNQVSLTCLVKGFYPSDIAVEWESNGQPENNYKTTPPVLDSDGSFFLYSKLTVDKSRWQQGNVFSCSVMHEALHNHYTQKSLSLSPGKGGGGSGGGGSIEEQAKTFLDKFNHEAEDLFYQSSLASWNYNTNITEENVQNMNNAGDKWSAFLKEQSTLAQMYPLQEIWDLGKGDFRGGGGSGGGGSIEEQAKTFLDKFNHEAEDLFYQSSLASWNYNTNITEENVQNMNNAGDKWSAFLKEQSTLAQMYPLQEIWDLGKGDFR

SEQ ID NO: 102 - protein, 1044 aa, Artificial Sequence
  Neuropilin-Immunoglobulin-ACE2 Construct No. 49
CMEALGMESGEIHSDQITASSQYSTNWSAERSRLNYPENGWTPGEDSYREWIQVDLGLLRFVTAVGTQGAISKETKKKYYVKTYKIDVSSNGEDWITIKEGNKPVLFQGNTNPTDVVVAVFPKPLITRFVRIKPATWETGISMRFEVYGCKITDYPCSGMLGMVSGLISDSQITSSNQGDRNWMPENIRLVTSRSGWALPPAPHSYINEWLQIDLGEEKIVRGIIIQGGKHRENKVFMRKFKIGYSNNGSDWKMIMDDSKRKAKSFEGNNNYDTPELRTFPALSTRFIRIYPERATHGGLGLRMELLGCGGGGSGGGGSCMEALGMESGEIHSDQITASSQYSTNWSAERSRLNYPENGWTPGEDSYREWIQVDLGLLRFVTAVGTQGAISKETKKKYYVKTYKIDVSSNGEDWITIKEGNKPVLFQGNTNPTDVVVAVFPKPLITRFVRIKPATWETGISMRFEVYGCKITDYPCSGMLGMVSGLISDSQITSSNQGDRNWMPENIRLVTSRSGWALPPAPHSYINEWLQIDLGEEKIVRGIIIQGGKHRENKVFMRKFKIGYSNNGSDWKMIMDDSKRKAKSFEGNNNYDTPELRTFPALSTRFIRIYPERATHGGLGLRMELLGCGGGGSGGGGSEPKSCDKTHTCPPCPAPEAAGGPSVFLFPPKPKDTLMISRTPEVTCVVVDVSHEDPEVKFNWYVDGVEVHNAKTKPREEQYNSTYRVVSVLTVLHQDWLNGKEYKCKVSNKALPAPIEKTISKAKGQPREPQVYTLPPSRDELTKNQVSLTCLVKGFYPSDIAVEWESNGQPENNYKTTPPVLDSDGSFFLYSKLTVDKSRWQQGNVFSCSVMHEALHNHYTQKSLSLSPGKGGGGSGGGGSIEEQAKTFLDKFNHEAEDLFYQSSLASWNYNTNITEENVQNMNNAGDKWSAFLKEQSTLAQMYPLQEIWDLGKGDFRGGGGSGGGGSIEEQAKTFLDKFNHEAEDLFYQSSLASWNYNTNITEENVQNMNNAGDKWSAFLKEQSTLAQMYPLQEIWDLGKGDFR

SEQ ID NO: 103 - protein, 911 aa, Artificial Sequence
  Neuropilin-Immunoglobulin-ACE2 Construct No. 50
CMEALGMESGEIHSDQITASSQYSTNWSAERSRLNYPENGWTPGEDSYREWIQVDLGLLRFVTAVGTQGAISKETKKKYYVKTYKIDVSSNGEDWITIKEGNKPVLFQGNTNPTDVVVAVFPKPLITRFVRIKPATWETGISMRFEVYGCKITDYPCSGMLGMVSGLISDSQITSSNQGDRNWMPENIRLVTSRSGWALPPAPHSYINEWLQIDLGEEKIVRGIIIQGGKHRENKVFMRKFKIGYSNNGSDWKMIMDDSKRKAKSFEGNNNYDTPELRTFPALSTRFIRIYPERATHGGLGLRMELLGCGGGGSGGGGSCMEALGMESGEIHSDQITASSQYSTNWSAERSRLNYPENGWTPGEDSYREWIQVDLGLLRFVTAVGTQGAISKETKKKYYVKTYKIDVSSNGEDWITIKEGNKPVLFQGNTNPTDVVVAVFPKPLITRFVRIKPATWETGISMRFEVYGCKITDYPCSGMLGMVSGLISDSQITSSNQGDRNWMPENIRLVTSRSGWALPPAPHSYINEWLQIDLGEEKIVRGIIIQGGKHRENKVFMRKFKIGYSNNGSDWKMIMDDSKRKAKSFEGNNNYDTPELRTFPALSTRFIRIYPERATHGGLGLRMELLGCGGGGSGGGGSEPKSCDKTHTCPPCPAPELLGGPSVFLFPPKPKDTLMISRTPEVTCVVVDVSHEDPEVKFNWYVDGVEVHNAKTKPREEQYNSTYRVVSVLTVLHQDWLNGKEYKCKVSNKALPAPIEKTISKAKGQPREPQVYTLPPSRDELTKNQVSLTCLVKGFYPSDIAVEWESNGQPENNYKTTPPVLDSDGSFFLYSKLTVDKSRWQQGNVFSCSVMHEALHNHYTQKSLSLSPGKGGGGSGGGGSEEQAKTFLDKFNHEAEDLFYQSSGLGKGDFR

SEQ ID NO: 104 - protein, 957 aa, Artificial Sequence
  Neuropilin-Immunoglobulin-ACE2 Construct No. 51
CMEALGMESGEIHSDQITASSQYSTNWSAERSRLNYPENGWTPGEDSYREWIQVDLGLLRFVTAVGTQGAISKETKKKYYVKTYKIDVSSNGEDWITIKEGNKPVLFQGNTNPTDVVVAVFPKPLITRFVRIKPATWETGISMRFEVYGCKITDYPCSGMLGMVSGLISDSQITSSNQGDRNWMPENIRLVTSRSGWALPPAPHSYINEWLQIDLGEEKIVRGIIIQGGKHRENKVFMRKFKIGYSNNGSDWKMIMDDSKRKAKSFEGNNNYDTPELRTFPALSTRFIRIYPERATHGGLGLRMELLGCGGGGSGGGGSCMEALGMESGEIHSDQITASSQYSTNWSAERSRLNYPENGWTPGEDSYREWIQVDLGLLRFVTAVGTQGAISKETKKKYYVKTYKIDVSSNGEDWITIKEGNKPVLFQGNTNPTDVVVAVFPKPLITRFVRIKPATWETGISMRFEVYGCKITDYPCSGMLGMVSGLISDSQITSSNQGDRNWMPENIRLVTSRSGWALPPAPHSYINEWLQIDLGEEKIVRGIIIQGGKHRENKVFMRKFKIGYSNNGSDWKMIMDDSKRKAKSFEGNNNYDTPELRTFPALSTRFIRIYPERATHGGLGLRMELLGCGGGGSGGGGSEPKSCDKTHTCPPCPAPELLGGPSVFLFPPKPKDTLMISRTPEVTCVVVDVSHEDPEVKFNWYVDGVEVHNAKTKPREEQYNSTYRVVSVLTVLHQDWLNGKEYKCKVSNKALPAPIEKTISKAKGQPREPQVYTLPPSRDELTKNQVSLTCLVKGFYPSDIAVEWESNGQPENNYKTTPPVLDSDGSFFLYSKLTVDKSRWQQGNVFSCSVMHEALHNHYTQKSLSLSPGKGGGGSGGGGSIEEQAKTFLDKFNHEAEDLFYQSSLASWNYNTNITEENVQNMNNAGDKWSAFLKEQSTLAQMYPLQEIWDLGKGDFR

SEQ ID NO: 105 - protein, 1044 aa, Artificial Sequence
  Neuropilin-Immunoglobulin-ACE2 Construct No. 52
CMEALGMESGEIHSDQITASSQYSTNWSAERSRLNYPENGWTPGEDSYREWIQVDLGLLRFVTAVGTQGAISKETKKKYYVKTYKIDVSSNGEDWITIKEGNKPVLFQGNTNPTDVVVAVFPKPLITRFVRIKPATWETGISMRFEVYGCKITDYPCSGMLGMVSGLISDSQITSSNQGDRNWMPENIRLVTSRSGWALPPAPHSYINEWLQIDLGEEKIVRGIIIQGGKHRENKVFMRKFKIGYSNNGSDWKMIMDDSKRKAKSFEGNNNYDTPELRTFPALSTRFIRIYPERATHGGLGLRMELLGCGGGGSGGGGSCMEALGMESGEIHSDQITASSQYSTNWSAERSRLNYPENGWTPGEDSYREWIQVDLGLLRFVTAVGTQGAISKETKKKYYVKTYKIDVSSNGEDWITIKEGNKPVLFQGNTNPTDVVVAVFPKPLITRFVRIKPATWETGISMRFEVYGCKITDYPCSGMLGMVSGLISDSQITSSNQGDRNWMPENIRLVTSRSGWALPPAPHSYINEWLQIDLGEEKIVRGIIIQGGKHRENKVFMRKFKIGYSNNGSDWKMIMDDSKRKAKSFEGNNNYDTPELRTFPALSTRFIRIYPERATHGGLGLRMELLGCGGGGSGGGGSEPKSCDKTHTCPPCPAPELLGGPSVFLFPPKPKDTLMISRTPEVTCVVVDVSHEDPEVKFNWYVDGVEVHNAKTKPREEQYASTYRVVSVLAVLHQDWLNGKEYKCKVSNKALPAPIEKTISKAKGQPREPQVYTLPPSRDELTKNQVSLTCLVKGFYPSDIAVAWESNGQPENNYKTTPPVLDSDGSFFLYSKLTVDKSRWQQGNVFSCSVMHEALHAHYTQKSLSLSPGKGGGGSGGGGSIEEQAKTFLDKFNHEAEDLFYQSSLASWNYNTNITEENVQNMNNAGDKWSAFLKEQSTLAQMYPLQEIWDLGKGDFRGGGGSGGGGSIEEQAKTFLDKFNHEAEDLFYQSSLASWNYNTNITEENVQNMNNAGDKWSAFLKEQSTLAQMYPLQEIWDLGKGDFR

SEQ ID NO: 106 - protein, 1044 aa, Artificial Sequence
  Neuropilin-Immunoglobulin-ACE2 Construct No. 53
CMEALGMESGEIHSDQITASSQYSTNWSAERSRLNYPENGWTPGEDSYREWIQVDLGLLRFVTAVGTQGAISKETKKKYYVKTYKIDVSSNGEDWITIKEGNKPVLFQGNTNPTDVVVAVFPKPLITRFVRIKPATWETGISMRFEVYGCKITDYPCSGMLGMVSGLISDSQITSSNQGDRNWMPENIRLVTSRSGWALPPAPHSYINEWLQIDLGEEKIVRGIIIQGGKHRENKVFMRKFKIGYSNNGSDWKMIMDDSKRKAKSFEGNNNYDTPELRTFPALSTRFIRIYPERATHGGLGLRMELLGCGGGGSGGGGSCMEALGMESGEIHSDQITASSQYSTNWSAERSRLNYPENGWTPGEDSYREWIQVDLGLLRFVTAVGTQGAISKETKKKYYVKTYKIDVSSNGEDWITIKEGNKPVLFQGNTNPTDVVVAVFPKPLITRFVRIKPATWETGISMRFEVYGCKITDYPCSGMLGMVSGLISDSQITSSNQGDRNWMPENIRLVTSRSGWALPPAPHSYINEWLQIDLGEEKIVRGIIIQGGKHRENKVFMRKFKIGYSNNGSDWKMIMDDSKRKAKSFEGNNNYDTPELRTFPALSTRFIRIYPERATHGGLGLRMELLGCGGGGSGGGGSEPKSCDKTHTCPPCPAPEAAGGPSVFLFPPKPKDTLMISRTPEVTCVVVDVSHEDPEVKFNWYVDGVEVHNAKTKPREEQYNSTYRVVSVLAVLHQDWLNGKEYKCKVSNKALPAPIEKTISKAKGQPREPQVYTLPPSRDELTKNQVSLTCLVKGFYPSDIAVAWESNGQPENNYKTTPPVLDSDGSFFLYSKLTVDKSRWQQGNVFSCSVMHEALHAHYTQKSLSLSPGKGGGGSGGGGSIEEQAKTFLDKFNHEAEDLFYQSSLASWNYNTNITEENVQNMNNAGDKWSAFLKEQSTLAQMYPLQEIWDLGKGDFRGGGGSGGGGSIEEQAKTFLDKFNHEAEDLFYQSSLASWNYNTNITEENVQNMNNAGDKWSAFLKEQSTLAQMYPLQEIWDLGKGDFR

SEQ ID NO: 107 - protein, 1044 aa, Artificial Sequence
  Neuropilin-Immunoglobulin-ACE2 Construct No. 54
CMEALGMESGEIHSDQITASSQYSTNWSAERSRLNYPENGWTPGADSYREWIQVDLGLLRFVTAVGTQGAISKETKKKYYVKTYKIDVSSNGEDWITIKEGNKPVLFQGNTNPTDVVVAVFPKPLITRFVRIKPATWETGISMRFEVYGCKITDYPCSGMLGMVSGLISDSQITSSNQGDRNWMPENIRLVTSRSGWALPPAPHSYINEWLQIDLGEEKIVRGIIIQGGKHRENKVFMRKFKIGYSNNGSDWKMIMDDSKRKAKSFEGNNNYDTPELRTFPALSTRFIRIYPERATHGGLGLRMELLGCGGGGSGGGGSCMEALGMESGEIHSDQITASSQYSTNWSAERSRLNYPENGWTPGADSYREWIQVDLGLLRFVTAVGTQGAISKETKKKYYVKTYKIDVSSNGEDWITIKEGNKPVLFQGNTNPTDVVVAVFPKPLITRFVRIKPATWETGISMRFEVYGCKITDYPCSGMLGMVSGLISDSQITSSNQGDRNWMPENIRLVTSRSGWALPPAPHSYINEWLQIDLGEEKIVRGIIIQGGKHRENKVFMRKFKIGYSNNGSDWKMIMDDSKRKAKSFEGNNNYDTPELRTFPALSTRFIRIYPERATHGGLGLRMELLGCGGGGSGGGGSEPKSCDKTHTCPPCPAPELLGGPSVFLFPPKPKDTLMISRTPEVTCVVVDVSHEDPEVKFNWYVDGVEVHNAKTKPREEQYASTYRVVSVLAVLHQDWLNGKEYKCKVSNKALPAPIEKTISKAKGQPREPQVYTLPPSRDELTKNQVSLTCLVKGFYPSDIAVAWESNGQPENNYKTTPPVLDSDGSFFLYSKLTVDKSRWQQGNVFSCSVMHEALHAHYTQKSLSLSPGKGGGGSGGGGSIEEQAKTFLDKFNHEAEDLFYQSSLASWNYNTNITEENVQNMNNAGDKWSAFLKEQSTLAQMYPLQEIWDLGKGDFRGGGGSGGGGSIEEQAKTFLDKFNHEAEDLFYQSSLASWNYNTNITEENVQNMNNAGDKWSAFLKEQSTLAQMYPLQEIWDLGKGDFR

SEQ ID NO: 108 - protein, 1044 aa, Artificial Sequence
  Neuropilin-Immunoglobulin-ACE2 Construct No. 55
CMEALGMESGEIHSDQITASSQYSTNWSAERSRLNYPENGWTPGADSYREWIQVDLGLLRFVTAVGTQGAISKETKKKYYVKTYKIDVSSNGEDWITIKEGNKPVLFQGNTNPTDVVVAVFPKPLITRFVRIKPATWETGISMRFEVYGCKITDYPCSGMLGMVSGLISDSQITSSNQGDRNWMPENIRLVTSRSGWALPPAPHSYINEWLQIDLGEEKIVRGIIIQGGKHRENKVFMRKFKIGYSNNGSDWKMIMDDSKRKAKSFEGNNNYDTPELRTFPALSTRFIRIYPERATHGGLGLRMELLGCGGGGSGGGGSCMEALGMESGEIHSDQITASSQYSTNWSAERSRLNYPENGWTPGADSYREWIQVDLGLLRFVTAVGTQGAISKETKKKYYVKTYKIDVSSNGEDWITIKEGNKPVLFQGNTNPTDVVVAVFPKPLITRFVRIKPATWETGISMRFEVYGCKITDYPCSGMLGMVSGLISDSQITSSNQGDRNWMPENIRLVTSRSGWALPPAPHSYINEWLQIDLGEEKIVRGIIIQGGKHRENKVFMRKFKIGYSNNGSDWKMIMDDSKRKAKSFEGNNNYDTPELRTFPALSTRFIRIYPERATHGGLGLRMELLGCGGGGSGGGGSEPKSCDKTHTCPPCPAPEAAGGPSVFLFPPKPKDTLMISRTPEVTCVVVDVSHEDPEVKFNWYVDGVEVHNAKTKPREEQYNSTYRVVSVLAVLHQDWLNGKEYKCKVSNKALPAPIEKTISKAKGQPREPQVYTLPPSRDELTKNQVSLTCLVKGFYPSDIAVAWESNGQPENNYKTTPPVLDSDGSFFLYSKLTVDKSRWQQGNVFSCSVMHEALHAHYTQKSLSLSPGKGGGGSGGGGSIEEQAKTFLDKFNHEAEDLFYQSSLASWNYNTNITEENVQNMNNAGDKWSAFLKEQSTLAQMYPLQEIWDLGKGDFRGGGGSGGGGSIEEQAKTFLDKFNHEAEDLFYQSSLASWNYNTNITEENVQNMNNAGDKWSAFLKEQSTLAQMYPLQEIWDLGKGDFR

SEQ ID NO: 109 - protein, 1040 aa, Artificial Sequence
  Neuropilin-Immunoglobulin-ACE2 Construct No. 56
CMEALGMESGEIHSDQITASSQYSTNWSAERSRLNYPENGWTPGEDSYREWIQVDLGLLRFVTAVGTQGAISKETKKKYYVKTYKIDVSSNGEDWITIKEGNKPVLFQGNTNPTDVVVAVFPKPLITRFVRIKPATWETGISMRFEVYGCKITDYPCSGMLGMVSGLISDSQITSSNQGDRNWMPENIRLVTSRSGWALPPAPHSYINEWLQIDLGEEKIVRGIIIQGGKHRENKVFMRKFKIGYSNNGSDWKMIMDDSKRKAKSFEGNNNYDTPELRTFPALSTRFIRIYPERATHGGLGLRMELLGCGGGGSGGGGSCMEALGMESGEIHSDQITASSQYSTNWSAERSRLNYPENGWTPGEDSYREWIQVDLGLLRFVTAVGTQGAISKETKKKYYVKTYKIDVSSNGEDWITIKEGNKPVLFQGNTNPTDVVVAVFPKPLITRFVRIKPATWETGISMRFEVYGCKITDYPCSGMLGMVSGLISDSQITSSNQGDRNWMPENIRLVTSRSGWALPPAPHSYINEWLQIDLGEEKIVRGIIIQGGKHRENKVFMRKFKIGYSNNGSDWKMIMDDSKRKAKSFEGNNNYDTPELRTFPALSTRFIRIYPERATHGGLGLRMELLGCGGGGSGGGGSERKCCVECPPCPAPPVAGPSVFLFPPKPKDQLMISRTPEVTCVVVDVSHEDPEVQFNWYVDGVEVHNAKTKPREEQFNSTFRVVSVLTVVHQDWLNGKEYKCKVSNKGLPAPIEKTISKTKGQPREPQVYTLPPSREEMTKNQVSLTCLVKGFYPSDIAVEWESNGQPENNYKTTPPMLDSDGSFFLYSKLTVDKSRWQQGNVFSCSVLHEALHNHYTQKSLSLSPGKGGGGSGGGGSIEEQAKTFLDKFNHEAEDLFYQSSLASWNYNTNITEENVQNMNNAGDKWSAFLKEQSTLAQMYPLQEIWDLGKGDFRGGGGSGGGGSIEEQAKTFLDKFNHEAEDLFYQSSLASWNYNTNITEENVQNMNNAGDKWSAFLKEQSTLAQMYPLQEIWDLGKGDFR

SEQ ID NO: 110 - protein, 1040 aa, Artificial Sequence
  Neuropilin-Immunoglobulin-ACE2 Construct No. 57
CMEALGMESGEIHSDQITASSQYSTNWSAERSRLNYPENGWTPGADSYREWIQVDLGLLRFVTAVGTQGAISKETKKKYYVKTYKIDVSSNGEDWITIKEGNKPVLFQGNTNPTDVVVAVFPKPLITRFVRIKPATWETGISMRFEVYGCKITDYPCSGMLGMVSGLISDSQITSSNQGDRNWMPENIRLVTSRSGWALPPAPHSYINEWLQIDLGEEKIVRGIIIQGGKHRENKVFMRKFKIGYSNNGSDWKMIMDDSKRKAKSFEGNNNYDTPELRTFPALSTRFIRIYPERATHGGLGLRMELLGCGGGGSGGGGSCMEALGMESGEIHSDQITASSQYSTNWSAERSRLNYPENGWTPGADSYREWIQVDLGLLRFVTAVGTQGAISKETKKKYYVKTYKIDVSSNGEDWITIKEGNKPVLFQGNTNPTDVVVAVFPKPLITRFVRIKPATWETGISMRFEVYGCKITDYPCSGMLGMVSGLISDSQITSSNQGDRNWMPENIRLVTSRSGWALPPAPHSYINEWLQIDLGEEKIVRGIIIQGGKHRENKVFMRKFKIGYSNNGSDWKMIMDDSKRKAKSFEGNNNYDTPELRTFPALSTRFIRIYPERATHGGLGLRMELLGCGGGGSGGGGSERKCCVECPPCPAPPVAGPSVFLFPPKPKDQLMISRTPEVTCVVVDVSHEDPEVQFNWYVDGVEVHNAKTKPREEQFNSTFRVVSVLTVVHQDWLNGKEYKCKVSNKGLPAPIEKTISKTKGQPREPQVYTLPPSREEMTKNQVSLTCLVKGFYPSDIAVEWESNGQPENNYKTTPPMLDSDGSFFLYSKLTVDKSRWQQGNVFSCSVLHEALHNHYTQKSLSLSPGKGGGGSGGGGSIEEQAKTFLDKFNHEAEDLFYQSSLASWNYNTNITEENVQNMNNAGDKWSAFLKEQSTLAQMYPLQEIWDLGKGDFRGGGGSGGGGSIEEQAKTFLDKFNHEAEDLFYQSSLASWNYNTNITEENVQNMNNAGDKWSAFLKEQSTLAQMYPLQEIWDLGKGDFR

SEQ ID NO: 111 - protein, 1044 aa, Artificial Sequence
  Neuropilin-Immunoglobulin-ACE2 Construct No. 58
CMEALGMESGEIHSDQITASSQASTNWSAERSRLNYPENGWTPGEDSYREWIQVDLGLLRFVTAVGTQGAIAKETKKKAYVKTYKIDVSSNGEDWITIKEGNKPVLFQGNTNPTDVVVAVFPKPLITRFVRIKPATWETGISMRFEVYGCKITDYPCSGMLGMVSGLISDSQITSSNQGDRNWMPENIRLVTSRSGWALPPAPHSYINEWLQIDLGEEKIVRGIIIQGGKHRENKVFMRKFKIGYSNNGSDWKMIMDDSKRKAKSFEGNNNYDTPELRTFPALSTRFIRIYPERATHGGLGLRMELLGCGGGGSGGGGSCMEALGMESGEIHSDQITASSQASTNWSAERSRLNYPENGWTPGEDSYREWIQVDLGLLRFVTAVGTQGAIAKETKKKAYVKTYKIDVSSNGEDWITIKEGNKPVLFQGNTNPTDVVVAVFPKPLITRFVRIKPATWETGISMRFEVYGCKITDYPCSGMLGMVSGLISDSQITSSNQGDRNWMPENIRLVTSRSGWALPPAPHSYINEWLQIDLGEEKIVRGIIIQGGKHRENKVFMRKFKIGYSNNGSDWKMIMDDSKRKAKSFEGNNNYDTPELRTFPALSTRFIRIYPERATHGGLGLRMELLGCGGGGSGGGGSEPKSCDKTHTCPPCPAPELLGGPSVFLFPPKPKDTLMISRTPEVTCVVVDVSHEDPEVKFNWYVDGVEVHNAKTKPREEQYASTYRVVSVLAVLHQDWLNGKEYKCKVSNKALPAPIEKTISKAKGQPREPQVYTLPPSRDELTKNQVSLTCLVKGFYPSDIAVAWESNGQPENNYKTTPPVLDSDGSFFLYSKLTVDKSRWQQGNVFSCSVMHEALHAHYTQKSLSLSPGKGGGGSGGGGSIEEQAKTFLDKFNHEAEDLFYQSSLASWNYNTNITEENVQNMNNAGDKWSAFLKEQSTLAQMYPLQEIWDLGKGDFRGGGGSGGGGSIEEQAKTFLDKFNHEAEDLFYQSSLASWNYNTNITEENVQNMNNAGDKWSAFLKEQSTLAQMYPLQEIWDLGKGDFR

SEQ ID NO: 112 - protein, 1044 aa, Artificial Sequence
  Neuropilin-Immunoglobulin-ACE2 Construct No. 59
CMEALGMESGEIHSDQITASSQASTNWSAERSRLNYPENGWTPGEDSYREWIQVDLGLLRFVTAVGTQGAIAKETKKKAYVKTYKIDVSSNGEDWITIKEGNKPVLFQGNTNPTDVVVAVFPKPLITRFVRIKPATWETGISMRFEVYGCKITDYPCSGMLGMVSGLISDSQITSSNQGDRNWMPENIRLVTSRSGWALPPAPHSYINEWLQIDLGEEKIVRGIIIQGGKHRENKVFMRKFKIGYSNNGSDWKMIMDDSKRKAKSFEGNNNYDTPELRTFPALSTRFIRIYPERATHGGLGLRMELLGCGGGGSGGGGSCMEALGMESGEIHSDQITASSQASTNWSAERSRLNYPENGWTPGEDSYREWIQVDLGLLRFVTAVGTQGAIAKETKKKAYVKTYKIDVSSNGEDWITIKEGNKPVLFQGNTNPTDVVVAVFPKPLITRFVRIKPATWETGISMRFEVYGCKITDYPCSGMLGMVSGLISDSQITSSNQGDRNWMPENIRLVTSRSGWALPPAPHSYINEWLQIDLGEEKIVRGIIIQGGKHRENKVFMRKFKIGYSNNGSDWKMIMDDSKRKAKSFEGNNNYDTPELRTFPALSTRFIRIYPERATHGGLGLRMELLGCGGGGSGGGGSEPKSCDKTHTCPPCPAPEAAGGPSVFLFPPKPKDTLMISRTPEVTCVVVDVSHEDPEVKFNWYVDGVEVHNAKTKPREEQYNSTYRVVSVLAVLHQDWLNGKEYKCKVSNKALPAPIEKTISKAKGQPREPQVYTLPPSRDELTKNQVSLTCLVKGFYPSDIAVAWESNGQPENNYKTTPPVLDSDGSFFLYSKLTVDKSRWQQGNVFSCSVMHEALHAHYTQKSLSLSPGKGGGGSGGGGSIEEQAKTFLDKFNHEAEDLFYQSSLASWNYNTNITEENVQNMNNAGDKWSAFLKEQSTLAQMYPLQEIWDLGKGDFRGGGGSGGGGSIEEQAKTFLDKFNHEAEDLFYQSSLASWNYNTNITEENVQNMNNAGDKWSAFLKEQSTLAQMYPLQEIWDLGKGDFR

SEQ ID NO: 113 - protein, 396 aa, Artificial Sequence
  VT-01
EDFKCMEALGMESGEIHSDQITASSQYSTNWSAERSRLNYPENGWTPGEDSYREWIQVDLGLLRFVTAVGTQGAISKETKKKYYVKTYKIDVSSNGEDWITIKEGNKPVLFQGNTNPTDVVVAVFPKPLITRFVRIKPATWETGISMRFEVYGCGGGGSGGGGSEPKSCDKTHTCPPCPAPELLGGPSVFLFPPKPKDTLMISRTPEVTCVVVDVSHEDPEVKFNWYVDGVEVHNAKTKPREEQYNSTYRVVSVLAVLHQDWLNGKEYKCKVSNKALPAPIEKTISKAKGQPREPQVYTLPPSRDELTKNQVSLTCLVKGFYPSDIAVAWESNGQPENNYKTTPPVLDSDGSFFLYSKLTVDKSRWQQGNVFSCSVMHEALHAHYTQKSLSLSPGK

SEQ ID NO: 114 - protein, 406 aa, Artificial Sequence
  Artificial Sequence
EDFKCMEALGMESGEIHSDQITASSQYSTNWSAERSRLNYPENGWTPGEDSYREWIQVDLGLLRFVTAVGTQGAISKETKKKYYVKTYKIDVSSNGEDWITIEEGNKPVLFQGNTNPTDVVVAVFPKPLITRFVRIKPATWETGISMRFEVYGCGGGGSGGGGSGGGGSGGGGSEPKSCDKTHTCPPCPAPELLGGPSVFLFPPKPKDTLMISRTPEVTCVVVDVSHEDPEVKFNWYVDGVEVHNAKTKPREEQYNSTYRVVSVLTVLHQDWLNGKEYKCKVSNKALPAPIEKTISKAKGQPREPQVYTLPPSRDELTKNQVSLTCLVKGFYPSDIAVEWESNGQPENNYKTTPPVLDSDGSFFLYSKLTVDKSRWQQGNVFSCSVMHEALHNHYTQKSLSLSPGK

SEQ ID NO: 115 - protein, 576 aa, Artificial Sequence
  Artificial Sequence
EDFKCMEALGMESGEIHSDQITASSQYSTNWSAERSRLNYPENGWTPGEDSYREWIQVDLGLLRFVTAVGTQGAISKETKKKYYVKTYKIDVSSNGEDWITIEEGNKPVLFQGNTNPTDVVVAVFPKPLITRFVRIKPATWETGISMRFEVYGCGGGGSGGGGSGGGGSGGGGSCMEALGMESGEIHSDQITASSQYSTNWSAERSRLNYPENGWTPGEDSYREWIQVDLGLLRFVTAVGTQGAISKETKKKYYVKTYKIDVSSNGEDWITIEEGNKPVLFQGNTNPTDVVVAVFPKPLITRFVRIKPATWETGISMRFEVYGCGGGGSGGGGSGGGGSGGGGSEPKSCDKTHTCPPCPAPELLGGPSVFLFPPKPKDTLMISRTPEVTCVVVDVSHEDPEVKFNWYVDGVEVHNAKTKPREEQYNSTYRVVSVLTVLHQDWLNGKEYKCKVSNKALPAPIEKTISKAKGQPREPQVYTLPPSRDELTKNQVSLTCLVKGFYPSDIAVEWESNGQPENNYKTTPPVLDSDGSFFLYSKLTVDKSRWQQGNVFSCSVMHEALHNHYTQKSLSLSPGK

SEQ ID NO: 116 - protein, 746 aa, Artificial Sequence
  Artificial Sequence
EDFKCMEALGMESGEIHSDQITASSQYSTNWSAERSRLNYPENGWTPGEDSYREWIQVDLGLLRFVTAVGTQGAISKETKKKYYVKTYKIDVSSNGEDWITIEEGNKPVLFQGNTNPTDVVVAVFPKPLITRFVRIKPATWETGISMRFEVYGCGGGGSGGGGSGGGGSGGGGSCMEALGMESGEIHSDQITASSQYSTNWSAERSRLNYPENGWTPGEDSYREWIQVDLGLLRFVTAVGTQGAISKETKKKYYVKTYKIDVSSNGEDWITIEEGNKPVLFQGNTNPTDVVVAVFPKPLITRFVRIKPATWETGISMRFEVYGCGGGGSGGGGSGGGGSGGGGSCMEALGMESGEIHSDQITASSQYSTNWSAERSRLNYPENGWTPGEDSYREWIQVDLGLLRFVTAVGTQGAISKETKKKYYVKTYKIDVSSNGEDWITIEEGNKPVLFQGNTNPTDVVVAVFPKPLITRFVRIKPATWETGISMRFEVYGCGGGGSGGGGSGGGGSGGGGSEPKSCDKTHTCPPCPAPELLGGPSVFLFPPKPKDTLMISRTPEVTCVVVDVSHEDPEVKFNWYVDGVEVHNAKTKPREEQYNSTYRVVSVLTVLHQDWLNGKEYKCKVSNKALPAPIEKTISKAKGQPREPQVYTLPPSRDELTKNQVSLTCLVKGFYPSDIAVEWESNGQPENNYKTTPPVLDSDGSFFLYSKLTVDKSRWQQGNVFSCSVMHEALHNHYTQKSLSLSPGK

SEQ ID NO: 117 - protein, 406 aa, Artificial Sequence
  Artificial Sequence
EDFKCMEALGMESGEIHSDQITASSQASTNWSAERSRLNYPENGWTPGEDSYREWIQVDLGLLRFVTAVGTQGAIAKETKKKAYVKTYKIDVSSNGEDWITIEEGNKPVLFQGNTNPTDVVVAVFPKPLITRFVRIKPATWETGISMRFEVYGCGGGGSGGGGSGGGGSGGGGSEPKSCDKTHTCPPCPAPELLGGPSVFLFPPKPKDTLMISRTPEVTCVVVDVSHEDPEVKFNWYVDGVEVHNAKTKPREEQYNSTYRVVSVLTVLHQDWLNGKEYKCKVSNKALPAPIEKTISKAKGQPREPQVYTLPPSRDELTKNQVSLTCLVKGFYPSDIAVEWESNGQPENNYKTTPPVLDSDGSFFLYSKLTVDKSRWQQGNVFSCSVMHEALHNHYTQKSLSLSPGK

SEQ ID NO: 118 - protein, 746 aa, Artificial Sequence
  Artificial Sequence
EDFKCMEALGMESGEIHSDQITASSQASTNWSAERSRLNYPENGWTPGEDSYREWIQVDLGLLRFVTAVGTQGAIAKETKKKAYVKTYKIDVSSNGEDWITIEEGNKPVLFQGNTNPTDVVVAVFPKPLITRFVRIKPATWETGISMRFEVYGCGGGGSGGGGSGGGGSGGGGSCMEALGMESGEIHSDQITASSQASTNWSAERSRLNYPENGWTPGEDSYREWIQVDLGLLRFVTAVGTQGAIAKETKKKAYVKTYKIDVSSNGEDWITIEEGNKPVLFQGNTNPTDVVVAVFPKPLITRFVRIKPATWETGISMRFEVYGCGGGGSGGGGSGGGGSGGGGSCMEALGMESGEIHSDQITASSQASTNWSAERSRLNYPENGWTPGEDSYREWIQVDLGLLRFVTAVGTQGAIAKETKKKAYVKTYKIDVSSNGEDWITIEEGNKPVLFQGNTNPTDVVVAVFPKPLITRFVRIKPATWETGISMRFEVYGCGGGGSGGGGSGGGGSGGGGSEPKSCDKTHTCPPCPAPELLGGPSVFLFPPKPKDTLMISRTPEVTCVVVDVSHEDPEVKFNWYVDGVEVHNAKTKPREEQYNSTYRVVSVLTVLHQDWLNGKEYKCKVSNKALPAPIEKTISKAKGQPREPQVYTLPPSRDELTKNQVSLTCLVKGFYPSDIAVEWESNGQPENNYKTTPPVLDSDGSFFLYSKLTVDKSRWQQGNVFSCSVMHEALHNHYTQKSLSLSPGK

SEQ ID NO: 119 - protein, 406 aa, Artificial Sequence
  Artificial Sequence
EDFKCMEALGMESGEIHSDQITASSQYSTNWSAERSRLNYPENGWTPGEDSYREWIQVDLGLLRFVTAVGTQGAISKETKKKYYVKTYEIDVSSNGEDWITIEEGNKPVLFQGNTNPTDVVVAVFPKPLITRFVRIKPATWETGISMRFEVYGCGGGGSGGGGSGGGGSGGGGSEPKSCDKTHTCPPCPAPELLGGPSVFLFPPKPKDTLMISRTPEVTCVVVDVSHEDPEVKFNWYVDGVEVHNAKTKPREEQYNSTYRVVSVLTVLHQDWLNGKEYKCKVSNKALPAPIEKTISKAKGQPREPQVYTLPPSRDELTKNQVSLTCLVKGFYPSDIAVEWESNGQPENNYKTTPPVLDSDGSFFLYSKLTVDKSRWQQGNVFSCSVMHEALHNHYTQKSLSLSPGK

SEQ ID NO: 120 - protein, 746 aa, Artificial Sequence
  Artificial Sequence
EDFKCMEALGMESGEIHSDQITASSQYSTNWSAERSRLNYPENGWTPGEDSYREWIQVDLGLLRFVTAVGTQGAISKETKKKYYVKTYEIDVSSNGEDWITIEEGNKPVLFQGNTNPTDVVVAVFPKPLITRFVRIKPATWETGISMRFEVYGCGGGGSGGGGSGGGGSGGGGSCMEALGMESGEIHSDQITASSQYSTNWSAERSRLNYPENGWTPGEDSYREWIQVDLGLLRFVTAVGTQGAISKETKKKYYVKTYEIDVSSNGEDWITIEEGNKPVLFQGNTNPTDVVVAVFPKPLITRFVRIKPATWETGISMRFEVYGCGGGGSGGGGSGGGGSGGGGSCMEALGMESGEIHSDQITASSQYSTNWSAERSRLNYPENGWTPGEDSYREWIQVDLGLLRFVTAVGTQGAISKETKKKYYVKTYEIDVSSNGEDWITIEEGNKPVLFQGNTNPTDVVVAVFPKPLITRFVRIKPATWETGISMRFEVYGCGGGGSGGGGSGGGGSGGGGSEPKSCDKTHTCPPCPAPELLGGPSVFLFPPKPKDTLMISRTPEVTCVVVDVSHEDPEVKFNWYVDGVEVHNAKTKPREEQYNSTYRVVSVLTVLHQDWLNGKEYKCKVSNKALPAPIEKTISKAKGQPREPQVYTLPPSRDELTKNQVSLTCLVKGFYPSDIAVEWESNGQPENNYKTTPPVLDSDGSFFLYSKLTVDKSRWQQGNVFSCSVMHEALHNHYTQKSLSLSPGK

SEQ ID NO: 121 - protein, 868 aa, Artificial Sequence
  Artificial Sequence
EDFKCMEALGMESGEIHSDQITASSQYSTNWSAERSRLNYPENGWTPGEDSYREWIQVDLGLLRFVTAVGTQGAISKETKKKYYVKTYKIDVSSNGEDWITIKEGNKPVLFQGNTNPTDVVVAVFPKPLITRFVRIKPATWETGISMRFEVYGCKITDYPCMEALGMESGEIHSDQITASSQYSTNWSAERSRLNYPENGWTPGEDSYREWIQVDLGLLRFVTAVGTQGAISKETKKKYYVKTYKIDVSSNGEDWITIKEGNKPVLFQGNTNPTDVVVAVFPKPLITRFVRIKPATWETGISMRFEVYGCGGGGSGGGGSCMEALGMESGEIHSDQITASSQYSTNWSAERSRLNYPENGWTPGEDSYREWIQVDLGLLRFVTAVGTQGAISKETKKKYYVKTYKIDVSSNGEDWITIKEGNKPVLFQGNTNPTDVVVAVFPKPLITRFVRIKPATWETGISMRFEVYGCKITDYPCMEALGMESGEIHSDQITASSQYSTNWSAERSRLNYPENGWTPGEDSYREWIQVDLGLLRFVTAVGTQGAISKETKKKYYVKTYKIDVSSNGEDWITIKEGNKPVLFQGNTNPTDVVVAVFPKPLITRFVRIKPATWETGISMRFEVYGCGGGGSGGGGSEPKSCDKTHTCPPCPAPELLGGPSVFLFPPKPKDTLMISRTPEVTCVVVDVSHEDPEVKFNWYVDGVEVHNAKTKPREEQYNSTYRVVSVLAVLHQDWLNGKEYKCKVSNKALPAPIEKTISKAKGQPREPQVYTLPPSRDELTKNQVSLTCLVKGFYPSDIAVAWESNGQPENNYKTTPPVLDSDGSFFLYSKLTVDKSRWQQGNVFSCSVMHEALHAHYTQKSLSLSPGK

SEQ ID NO: 122 - protein, 555 aa, Artificial Sequence
  Artificial Sequence
EDFKCMEALGMESGEIHSDQITASSQYSTNWSAERSRLNYPENGWTPGEDSYREWIQVDLGLLRFVTAVGTQGAISKETKKKYYVKTYKIDVSSNGEDWITIKEGNKPVLFQGNTNPTDVVVAVFPKPLITRFVRIKPATWETGISMRFEVYGCKITDYPCSGMLGMVSGLISDSQITSSNQGDRNWMPENIRLVTSRSGWALPPAPHSYINEWLQIDLGEEKIVRGIIIQGGKHRENKVFMRKFKIGYSNNGSDWKMIMDDSKRKAKSFEGNNNYDTPELRTFPALSTRFIRIYPERATHGGLGLRMELLGCGGGGSGGGGSEPKSCDKTHTCPPCPAPELLGGPSVFLFPPKPKDTLMISRTPEVTCVVVDVSHEDPEVKFNWYVDGVEVHNAKTKPREEQYNSTYRVVSVLTVLHQDWLNGKEYKCKVSNKALPAPIEKTISKAKGQPREPQVYTLPPSRDELTKNQVSLTCLVKGFYPSDIAVEWESNGQPENNYKTTPPVLDSDGSFFLYSKLTVDKSRWQQGNVFSCSVMHEALHNHYTQKSLSLSPGK

SEQ ID NO: 123 - protein, 551 aa, Artificial Sequence
  Artificial Sequence
EDFKCMEALGMESGEIHSDQITASSQYSTNWSAERSRLNYPENGWTPGADSYREWIQVDLGLLRFVTAVGTQGAISKETKKKYYVKTYKIDVSSNGEDWITIKEGNKPVLFQGNTNPTDVVVAVFPKPLITRFVRIKPATWETGISMRFEVYGCKITDYPCSGMLGMVSGLISDSQITSSNQGDRNWMPENIRLVTSRSGWALPPAPHSYINEWLQIDLGEEKIVRGIIIQGGKHRENKVFMRKFKIGYSNNGSDWKMIMDDSKRKAKSFEGNNNYDTPELRTFPALSTRFIRIYPERATHGGLGLRMELLGCGGGGSGGGGSERKCCVECPPCPAPPVAGPSVFLFPPKPKDQLMISRTPEVTCVVVDVSHEDPEVQFNWYVDGVEVHNAKTKPREEQFNSTFRVVSVLTVVHQDWLNGKEYKCKVSNKGLPAPIEKTISKTKGQPREPQVYTLPPSREEMTKNQVSLTCLVKGFYPSDIAVEWESNGQPENNYKTTPPMLDSDGSFFLYSKLTVDKSRWQQGNVFSCSVLHEALHNHYTQKSLSLSPGK

SEQ ID NO: 124 - protein, 551 aa, Artificial Sequence
  Artificial Sequence
EDFKCMEALGMESGEIHSDQITASSQYSTNWSAERSRLNYPENGWTPGEDSYREWIQVDLGLLRFVTAVGTQGAISKETKAKYYVKTYKIDVSSNGEDWITIKEGNKPVLFQGNTNPTDVVVAVFPKPLITRFVRIKPATWETGISMRFEVYGCKITDYPCSGMLGMVSGLISDSQITSSNQGDRNWMPENIRLVTSRSGWALPPAPHSYINEWLQIDLGEEKIVRGIIIQGGKHRENKVFMRKFKIGYSNNGSDWKMIMDDSKRKAKSFEGNNNYDTPELRTFPALSTRFIRIYPERATHGGLGLRMELLGCGGGGSGGGGSERKCCVECPPCPAPPVAGPSVFLFPPKPKDQLMISRTPEVTCVVVDVSHEDPEVQFNWYVDGVEVHNAKTKPREEQFNSTFRVVSVLTVVHQDWLNGKEYKCKVSNKGLPAPIEKTISKTKGQPREPQVYTLPPSREEMTKNQVSLTCLVKGFYPSDIAVEWESNGQPENNYKTTPPMLDSDGSFFLYSKLTVDKSRWQQGNVFSCSVLHEALHNHYTQKSLSLSPGK

SEQ ID NO: 125 - protein, 551 aa, Artificial Sequence
  Artificial Sequence
EDFKCMEALGMESGEIHSDQITASSQASTNWSAERSRLNYPENGWTPGEDSYREWIQVDLGLLRFVTAVGTQGAIAKETKKKAYVKTYKIDVSSNGEDWITIKEGNKPVLFQGNTNPTDVVVAVFPKPLITRFVRIKPATWETGISMRFEVYGCKITDYPCSGMLGMVSGLISDSQITSSNQGDRNWMPENIRLVTSRSGWALPPAPHSYINEWLQIDLGEEKIVRGIIIQGGKHRENKVFMRKFKIGYSNNGSDWKMIMDDSKRKAKSFEGNNNYDTPELRTFPALSTRFIRIYPERATHGGLGLRMELLGCGGGGSGGGGSERKCCVECPPCPAPPVAGPSVFLFPPKPKDQLMISRTPEVTCVVVDVSHEDPEVQFNWYVDGVEVHNAKTKPREEQFNSTFRVVSVLTVVHQDWLNGKEYKCKVSNKGLPAPIEKTISKTKGQPREPQVYTLPPSREEMTKNQVSLTCLVKGFYPSDIAVEWESNGQPENNYKTTPPMLDSDGSFFLYSKLTVDKSRWQQGNVFSCSVLHEALHNHYTQKSLSLSPGK

SEQ ID NO: 126 - protein, 552 aa, Artificial Sequence
  Artificial Sequence
EDFKCMEALGMESGEIHSDQITASSQYSTNWSAERSRLNYPENGWTPGEDSYREWIQVDLGLLRFVTAVGTQGAISKETKKKYYVKTYKIDVSSNGEDWITIKEGNKPVLFQGNTNPTDVVVAVFPKPLITRFVRIKPATWETGISMRFEVYGCKITDYPCSGMLGMVSGLISDSQITSSNQGDRNWMPENIRLVTSRSGWALPPAPHSYINEWLQIDLGEEKIVRGIIIQGGKHRENKVFMEEFEIGYSNNGSDWKMIMDDSKRKAKSFEGNNNYDTPELRTFPALSTRFIRIYPERATHGGLGLRMELLGCEVEAGAPAPAGAPAPATCPPCPAPELLGGPSVFLFPPKPKDTLMISRTPEVTCVVVDVSHEDPEVKFNWYVDGVEVHNAKTKPREEQYNSTYRVVSVLTVLHQDWLNGKEYKCKVSNKALPAPIEKTISKAKGQPREPQVYTLPPSRDELTKNQVSLTCLVKGFYPSDIAVEWESNGQPENNYKTTPPVLDSDGSFFLYSKLTVDKSRWQQGNVFSCSVMHEALHNHYTQKSLSLSPGK

SEQ ID NO: 127 - protein, 552 aa, Artificial Sequence
  Artificial Sequence
EDFKCMEALGMESGEIHSDQITASSQYSTNWSAERSRLNYPENGWTPGEDSYREWIQVDLGLLRFVTAVGTQGAISKETKKKYYVKTYKIDVSSNGEDWITIKEGNKPVLFQGNTNPTDVVVAVFPKPLITRFVRIKPATWETGISMRFEVYGCKITDYPCSGMLGMVSGLISDSQITSSNQGDRNWMPENIRLVTSRSGWALPPAPHSYINEWLQIDLGEEKIVRGIIIQGGKHRENKVFMAAFAIGYSNNGSDWKMIMDDSKRKAKSFEGNNNYDTPELRTFPALSTRFIRIYPERATHGGLGLRMELLGCEVEAGAPAPAGAPAPATCPPCPAPELLGGPSVFLFPPKPKDTLMISRTPEVTCVVVDVSHEDPEVKFNWYVDGVEVHNAKTKPREEQYNSTYRVVSVLTVLHQDWLNGKEYKCKVSNKALPAPIEKTISKAKGQPREPQVYTLPPSRDELTKNQVSLTCLVKGFYPSDIAVEWESNGQPENNYKTTPPVLDSDGSFFLYSKLTVDKSRWQQGNVFSCSVMHEALHNHYTQKSLSLSPGK

SEQ ID NO: 128 - protein, 555 aa, Artificial Sequence
  Artificial Sequence
EDFKCMEALGMESGEIHSDQITASSQYSTNWSAERSRLNYPENGWTPGEDSYREWIQVDLGLLRFVTAVGTQGAISKETKKKYYVKTYEIDVSSNGEDWITIEEGNKPVLFQGNTNPTDVVVAVFPKPLITRFVRIKPATWETGISMRFEVYGCKITDYPCSGMLGMVSGLISDSQITSSNQGDRNWMPENIRLVTSRSGWALPPAPHSYINEWLQIDLGEEKIVRGIIIQGGKHRENKVFMEEFEIGYSNNGSDWKMIMDDSKRKAKSFEGNNNYDTPELRTFPALSTRFIRIYPERATHGGLGLRMELLGCGGGGSGGGGSEPKSCDKTHTCPPCPAPELLGGPSVFLFPPKPKDTLMISRTPEVTCVVVDVSHEDPEVKFNWYVDGVEVHNAKTKPREEQYNSTYRVVSVLTVLHQDWLNGKEYKCKVSNKALPAPIEKTISKAKGQPREPQVYTLPPSRDELTKNQVSLTCLVKGFYPSDIAVEWESNGQPENNYKTTPPVLDSDGSFFLYSKLTVDKSRWQQGNVFSCSVMHEALHNHYTQKSLSLSPGK

SEQ ID NO: 129 - protein, 555 aa, Artificial Sequence
  Artificial Sequence
EDFKCMEALGMESGEIHSDQITASSQASTNWSAERSRLNYPENGWTPGEDSYREWIQVDLGLLRFVTAVGTQGAIAKETKKKAYVKTYEIDVSSNGEDWITIEEGNKPVLFQGNTNPTDVVVAVFPKPLITRFVRIKPATWETGISMRFEVYGCKITDYPCSGMLGMVSGLISDSQITSSNQGDRNWMPENIRLVTSRSGWALPPAPHSYINEWLQIDLGEEKIVRGIIIQGGKHRENKVFMEEFEIGYSNNGSDWKMIMDDSKRKAKSFEGNNNYDTPELRTFPALSTRFIRIYPERATHGGLGLRMELLGCGGGGSGGGGSEPKSCDKTHTCPPCPAPELLGGPSVFLFPPKPKDTLMISRTPEVTCVVVDVSHEDPEVKFNWYVDGVEVHNAKTKPREEQYNSTYRVVSVLTVLHQDWLNGKEYKCKVSNKALPAPIEKTISKAKGQPREPQVYTLPPSRDELTKNQVSLTCLVKGFYPSDIAVEWESNGQPENNYKTTPPVLDSDGSFFLYSKLTVDKSRWQQGNVFSCSVMHEALHNHYTQKSLSLSPGK

SEQ ID NO: 130 - protein, 552 aa, Artificial Sequence
  Artificial Sequence
TCPPCPAPEFLGGPSVFLFPPKPKDTLMISRTPEVTCVVVDVSQEDPEVQFNWYVDGVEVHNAKTKPREEQFNSTYRVVSVLTVLHQDWLNGKEYKCKVSNKGLPSSIEKTISKAKGQPREPQVYTLPPSQEEMTENQVSLTCLVKGFYPSDIAVEWESNGQPENNYKTTPPVLDSDGSFFLYSWLTVDKSRWQEGNVFSCSVMHEALHNHYTQKSLSLSLGKGAPAPAGAPAPAEDFKCMEALGMESGEIHSDQITASSQYSTNWSAERSRLNYPENGWTPGEDSYREWIQVDLGLLRFVTAVGTQGAISKETKKKYYVKTYKIDVSSNGEDWITIKEGNKPVLFQGNTNPTDVVVAVFPKPLITRFVRIKPATWETGISMRFEVYGCKITDYPCSGMLGMVSGLISDSQITSSNQGDRNWMPENIRLVTSRSGWALPPAPHSYINEWLQIDLGEEKIVRGIIIQGGKHRENKVFMRKFKIGYSNNGSDWKMIMDDSKRKAKSFEGNNNYDTPELRTFPALSTRFIRIYPERATHGGLGLRMELLGCEVEA

SEQ ID NO: 131 - protein, 552 aa, Artificial Sequence
  Artificial Sequence
TCPPCPAPEFLGGPSVFLFPPKPKDTLMISRTPEVTCVVVDVSQEDPEVQFNWYVDGVEVHNAKTKPREEQFNSTYRVVSVLTVLHQDWLNGKEYKCKVSNKGLPSSIEKTISKAKGQPREPQVYTLPPSQEEMTENQVSLTCLVKGFYPSDIAVEWESNGQPENNYKTTPPVLDSDGSFFLYSWLTVDKSRWQEGNVFSCSVMHEALHNHYTQKSLSLSLGKGAPAPAGAPAPAEDFKCMEALGMESGEIHSDQITASSQASTNWSAERSRLNYPENGWAPGEASYREWIQVDLGLLRFVTAVGTQGAISKETKKKYYVKTYKIDVSSNGEDWITIKEGNKPVLFQGNTNPTDVVVAVFPKPLITRFVRIKPATWETGISMRFEVYGCKITDYPCSGMLGMVSGLISDSQITSSNQGDRNWMPENIRLVTSRSGWALPPAPHSYINEWLQIDLGEEKIVRGIIIQGGKHRENKVFMAAFAIGYSNNGSDWKMIMDDSKRKAKSFEGNNNYDTPELRTFPALSTRFIRIYPERATHGGLGLRMELLGCEVEA

SEQ ID NO: 132 - protein, 552 aa, Artificial Sequence
  Artificial Sequence
TCPPCPAPEFLGGPSVFLFPPKPKDTLMISRTPEVTCVVVDVSQEDPEVQFNWYVDGVEVHNAKTKPREEQFNSTYRVVSVLTVLHQDWLNGKEYKCKVSNKGLPSSIEKTISKAKGQPREPQVYTLPPSQEEMTENQVSLTCLVKGFYPSDIAVEWESNGQPENNYKTTPPVLDSDGSFFLYSWLTVDKSRWQEGNVFSCSVMHEALHNHYTQKSLSLSLGKGAPAPAGAPAPAEDFKCSGMLGMVSGLISDSQITSSNQGDRNWMPENIRLVTSRSGWALPPAPHSYINEWLQIDLGEEKIVRGIIIQGGKHRENKVFMAAFAIGYSNNGSDWKMIMDDSKRKAKSFEGNNNYDTPELRTFPALSTRFIRIYPERATHGGLGLRMELLGCKITDYPCMEALGMESGEIHSDQITASSQASTNWSAERSRLNYPENGWAPGEASYREWIQVDLGLLRFVTAVGTQGAISKETKKKYYVKTYKIDVSSNGEDWITIKEGNKPVLFQGNTNPTDVVVAVFPKPLITRFVRIKPATWETGISMRFEVYGCEVEA

SEQ ID NO: 133 - protein, 580 aa, Artificial Sequence
  Artificial Sequence
EDFKCMEALGMESGEIHSDQITASSQYSTNWSAERSRLNYPENGWTPGEDSYREWIQVDLGLLRFVTAVGTQGAISKETKKKYYVKTYKIDVSSNGEDWITIEEGNKPVLFQGNTNPTDVVVAVFPKPLITRFVRIKPATWETGISMRFEVYGCGGGGSGGGGSGGGGSGGGGSEPKSCDKTHTCPPCPAPELLGGPSVFLFPPKPKDTLMISRTPEVTCVVVDVSHEDPEVKFNWYVDGVEVHNAKTKPREEQYNSTYRVVSVLTVLHQDWLNGKEYKCKVSNKALPAPIEKTISKAKGQPREPQVYTLPPSRDELTKNQVSLTCLVKGFYPSDIAVEWESNGQPENNYKTTPPVLDSDGSFFLYSKLTVDKSRWQQGNVFSCSVMHEALHNHYTQKSLSLSPGKGGGGSGGGGSGGGGSGGGGSCMEALGMESGEIHSDQITASSQYSTNWSAERSRLNYPENGWTPGEDSYREWIQVDLGLLRFVTAVGTQGAISKETKKKYYVKTYKIDVSSNGEDWITIEEGNKPVLFQGNTNPTDVVVAVFPKPLITRFVRIKPATWETGISMRFEVYGCEVEA

SEQ ID NO: 134 - protein, 750 aa, Artificial Sequence
  Artificial Sequence
EDFKCMEALGMESGEIHSDQITASSQYSTNWSAERSRLNYPENGWTPGEDSYREWIQVDLGLLRFVTAVGTQGAISKETKKKYYVKTYKIDVSSNGEDWITIEEGNKPVLFQGNTNPTDVVVAVFPKPLITRFVRIKPATWETGISMRFEVYGCGGGGSGGGGSGGGGSGGGGSCMEALGMESGEIHSDQITASSQYSTNWSAERSRLNYPENGWTPGEDSYREWIQVDLGLLRFVTAVGTQGAISKETKKKYYVKTYKIDVSSNGEDWITIEEGNKPVLFQGNTNPTDVVVAVFPKPLITRFVRIKPATWETGISMRFEVYGCGGGGSGGGGSGGGGSGGGGSEPKSCDKTHTCPPCPAPELLGGPSVFLFPPKPKDTLMISRTPEVTCVVVDVSHEDPEVKFNWYVDGVEVHNAKTKPREEQYNSTYRVVSVLTVLHQDWLNGKEYKCKVSNKALPAPIEKTISKAKGQPREPQVYTLPPSRDELTKNQVSLTCLVKGFYPSDIAVEWESNGQPENNYKTTPPVLDSDGSFFLYSKLTVDKSRWQQGNVFSCSVMHEALHNHYTQKSLSLSPGKGGGGSGGGGSGGGGSGGGGSCMEALGMESGEIHSDQITASSQYSTNWSAERSRLNYPENGWTPGEDSYREWIQVDLGLLRFVTAVGTQGAISKETKKKYYVKTYKIDVSSNGEDWITIEEGNKPVLFQGNTNPTDVVVAVFPKPLITRFVRIKPATWETGISMRFEVYGCEVEA

SEQ ID NO: 135 - protein, 576 aa, Artificial Sequence
  Artificial Sequence
EDFKCMEALGMESGEIHSDQITASSQYSTNWSAERSRLNYPENGWTPGEDSYREWIQVDLGLLRFVTAVGTQGAISKETKKKYYVKTYKIDVSSNGEDWITIKEGNKPVLFQGNTNPTDVVVAVFPKPLITRFVRIKPATWETGISMRFEVYGCGGGGSGGGGSGGGGSGGGGSCMEALGMESGEIHSDQITASSQYSTNWSAERSRLNYPENGWTPGEDSYREWIQVDLGLLRFVTAVGTQGAISKETKKKYYVKTYKIDVSSNGEDWITIKEGNKPVLFQGNTNPTDVVVAVFPKPLITRFVRIKPATWETGISMRFEVYGCGGGGSGGGGSGGGGSGGGGSEPKSCDKTHTCPPCPAPELLGGPSVFLFPPKPKDTLMISRTPEVTCVVVDVSHEDPEVKFNWYVDGVEVHNAKTKPREEQYNSTYRVVSVLTVLHQDWLNGKEYKCKVSNKALPAPIEKTISKAKGQPREPQVYTLPPSRDELTKNQVSLTCLVKGFYPSDIAVEWESNGQPENNYKTTPPVLDSDGSFFLYSKLTVDKSRWQQGNVFSCSVMHEALHNHYTQKSLSLSPGK

SEQ ID NO: 136 - protein, 746 aa, Artificial Sequence
  Artificial Sequence
EDFKCMEALGMESGEIHSDQITASSQYSTNWSAERSRLNYPENGWTPGEDSYREWIQVDLGLLRFVTAVGTQGAISKETKKKYYVKTYKIDVSSNGEDWITIKEGNKPVLFQGNTNPTDVVVAVFPKPLITRFVRIKPATWETGISMRFEVYGCGGGGSGGGGSGGGGSGGGGSCMEALGMESGEIHSDQITASSQYSTNWSAERSRLNYPENGWTPGEDSYREWIQVDLGLLRFVTAVGTQGAISKETKKKYYVKTYKIDVSSNGEDWITIKEGNKPVLFQGNTNPTDVVVAVFPKPLITRFVRIKPATWETGISMRFEVYGCGGGGSGGGGSGGGGSGGGGSCMEALGMESGEIHSDQITASSQYSTNWSAERSRLNYPENGWTPGEDSYREWIQVDLGLLRFVTAVGTQGAISKETKKKYYVKTYKIDVSSNGEDWITIKEGNKPVLFQGNTNPTDVVVAVFPKPLITRFVRIKPATWETGISMRFEVYGCGGGGSGGGGSGGGGSGGGGSEPKSCDKTHTCPPCPAPELLGGPSVFLFPPKPKDTLMISRTPEVTCVVVDVSHEDPEVKFNWYVDGVEVHNAKTKPREEQYNSTYRVVSVLTVLHQDWLNGKEYKCKVSNKALPAPIEKTISKAKGQPREPQVYTLPPSRDELTKNQVSLTCLVKGFYPSDIAVEWESNGQPENNYKTTPPVLDSDGSFFLYSKLTVDKSRWQQGNVFSCSVMHEALHNHYTQKSLSLSPGK

SEQ ID NO: 137 - protein, 580 aa, Artificial Sequence
  Artificial Sequence
EDFKCMEALGMESGEIHSDQITASSQYSTNWSAERSRLNYPENGWTPGEDSYREWIQVDLGLLRFVTAVGTQGAISKETKKKYYVKTYKIDVSSNGEDWITIKEGNKPVLFQGNTNPTDVVVAVFPKPLITRFVRIKPATWETGISMRFEVYGCGGGGSGGGGSGGGGSGGGGSEPKSCDKTHTCPPCPAPELLGGPSVFLFPPKPKDTLMISRTPEVTCVVVDVSHEDPEVKFNWYVDGVEVHNAKTKPREEQYNSTYRVVSVLTVLHQDWLNGKEYKCKVSNKALPAPIEKTISKAKGQPREPQVYTLPPSRDELTKNQVSLTCLVKGFYPSDIAVEWESNGQPENNYKTTPPVLDSDGSFFLYSKLTVDKSRWQQGNVFSCSVMHEALHNHYTQKSLSLSPGKGGGGSGGGGSGGGGSGGGGSCMEALGMESGEIHSDQITASSQYSTNWSAERSRLNYPENGWTPGEDSYREWIQVDLGLLRFVTAVGTQGAISKETKKKYYVKTYKIDVSSNGEDWITIKEGNKPVLFQGNTNPTDVVVAVFPKPLITRFVRIKPATWETGISMRFEVYGCEVEA

SEQ ID NO: 138 - protein, 874 aa, Artificial Sequence
  Artificial Sequence
EDFKCMEALGMESGEIHSDQITASSQYSTNWSAERSRLNYPENGWTPGEDSYREWIQVDLGLLRFVTAVGTQGAISKETKKKYYVKTYKIDVSSNGEDWITIKEGNKPVLFQGNTNPTDVVVAVFPKPLITRFVRIKPATWETGISMRFEVYGCKITDYPCSGMLGMVSGLISDSQITSSNQGDRNWMPENIRLVTSRSGWALPPAPHSYINEWLQIDLGEEKIVRGIIIQGGKHRENKVFMRKFKIGYSNNGSDWKMIMDDSKRKAKSFEGNNNYDTPELRTFPALSTRFIRIYPERATHGGLGLRMELLGCGGGGSGGGGSCMEALGMESGEIHSDQITASSQYSTNWSAERSRLNYPENGWTPGEDSYREWIQVDLGLLRFVTAVGTQGAISKETKKKYYVKTYKIDVSSNGEDWITIKEGNKPVLFQGNTNPTDVVVAVFPKPLITRFVRIKPATWETGISMRFEVYGCKITDYPCSGMLGMVSGLISDSQITSSNQGDRNWMPENIRLVTSRSGWALPPAPHSYINEWLQIDLGEEKIVRGIIIQGGKHRENKVFMRKFKIGYSNNGSDWKMIMDDSKRKAKSFEGNNNYDTPELRTFPALSTRFIRIYPERATHGGLGLRMELLGCGGGGSGGGGSEPKSCDKTHTCPPCPAPELLGGPSVFLFPPKPKDTLMISRTPEVTCVVVDVSHEDPEVKFNWYVDGVEVHNAKTKPREEQYNSTYRVVSVLAVLHQDWLNGKEYKCKVSNKALPAPIEKTISKAKGQPREPQVYTLPPSRDELTKNQVSLTCLVKGFYPSDIAVAWESNGQPENNYKTTPPVLDSDGSFFLYSKLTVDKSRWQQGNVFSCSVMHEALHAHYTQKSLSLSPGK

SEQ ID NO: 139 - protein, 874 aa, Artificial Sequence
  Artificial Sequence
EDFKCMEALGMESGEIHSDQITASSQYSTNWSAERSRLNYPENGWTPGADSYREWIQVDLGLLRFVTAVGTQGAISKETKKKYYVKTYKIDVSSNGEDWITIKEGNKPVLFQGNTNPTDVVVAVFPKPLITRFVRIKPATWETGISMRFEVYGCKITDYPCSGMLGMVSGLISDSQITSSNQGDRNWMPENIRLVTSRSGWALPPAPHSYINEWLQIDLGEEKIVRGIIIQGGKHRENKVFMRKFKIGYSNNGSDWKMIMDDSKRKAKSFEGNNNYDTPELRTFPALSTRFIRIYPERATHGGLGLRMELLGCGGGGSGGGGSCMEALGMESGEIHSDQITASSQYSTNWSAERSRLNYPENGWTPGADSYREWIQVDLGLLRFVTAVGTQGAISKETKKKYYVKTYKIDVSSNGEDWITIKEGNKPVLFQGNTNPTDVVVAVFPKPLITRFVRIKPATWETGISMRFEVYGCKITDYPCSGMLGMVSGLISDSQITSSNQGDRNWMPENIRLVTSRSGWALPPAPHSYINEWLQIDLGEEKIVRGIIIQGGKHRENKVFMRKFKIGYSNNGSDWKMIMDDSKRKAKSFEGNNNYDTPELRTFPALSTRFIRIYPERATHGGLGLRMELLGCGGGGSGGGGSEPKSCDKTHTCPPCPAPELLGGPSVFLFPPKPKDTLMISRTPEVTCVVVDVSHEDPEVKFNWYVDGVEVHNAKTKPREEQYNSTYRVVSVLTVLHQDWLNGKEYKCKVSNKALPAPIEKTISKAKGQPREPQVYTLPPSRDELTKNQVSLTCLVKGFYPSDIAVEWESNGQPENNYKTTPPVLDSDGSFFLYSKLTVDKSRWQQGNVFSCSVMHEALHNHYTQKSLSLSPGK

SEQ ID NO: 140 - protein, 874 aa, Artificial Sequence
  Artificial Sequence
EDFKCMEALGMESGEIHSDQITASSQYSTNWSAERSRLNYPENGWTPGEDSYREWIQVDLGLLRFVTAVGTQGAISKETKAKYYVKTYKIDVSSNGEDWITIKEGNKPVLFQGNTNPTDVVVAVFPKPLITRFVRIKPATWETGISMRFEVYGCKITDYPCSGMLGMVSGLISDSQITSSNQGDRNWMPENIRLVTSRSGWALPPAPHSYINEWLQIDLGEEKIVRGIIIQGGKHRENKVFMRKFKIGYSNNGSDWKMIMDDSKRKAKSFEGNNNYDTPELRTFPALSTRFIRIYPERATHGGLGLRMELLGCGGGGSGGGGSCMEALGMESGEIHSDQITASSQYSTNWSAERSRLNYPENGWTPGEDSYREWIQVDLGLLRFVTAVGTQGAISKETKAKYYVKTYKIDVSSNGEDWITIKEGNKPVLFQGNTNPTDVVVAVFPKPLITRFVRIKPATWETGISMRFEVYGCKITDYPCSGMLGMVSGLISDSQITSSNQGDRNWMPENIRLVTSRSGWALPPAPHSYINEWLQIDLGEEKIVRGIIIQGGKHRENKVFMRKFKIGYSNNGSDWKMIMDDSKRKAKSFEGNNNYDTPELRTFPALSTRFIRIYPERATHGGLGLRMELLGCGGGGSGGGGSEPKSCDKTHTCPPCPAPELLGGPSVFLFPPKPKDTLMISRTPEVTCVVVDVSHEDPEVKFNWYVDGVEVHNAKTKPREEQYASTYRVVSVLAVLHQDWLNGKEYKCKVSNKALPAPIEKTISKAKGQPREPQVYTLPPSRDELTKNQVSLTCLVKGFYPSDIAVAWESNGQPENNYKTTPPVLDSDGSFFLYSKLTVDKSRWQQGNVFSCSVMHEALHAHYTQKSLSLSPGK

SEQ ID NO: 141 - protein, 874 aa, Artificial Sequence
  Artificial Sequence
EDFKCMEALGMESGEIHSDQITASSQASTNWSAERSRLNYPENGWTPGEDSYREWIQVDLGLLRFVTAVGTQGAIAKETKKKAYVKTYKIDVSSNGEDWITIKEGNKPVLFQGNTNPTDVVVAVFPKPLITRFVRIKPATWETGISMRFEVYGCKITDYPCSGMLGMVSGLISDSQITSSNQGDRNWMPENIRLVTSRSGWALPPAPHSYINEWLQIDLGEEKIVRGIIIQGGKHRENKVFMRKFKIGYSNNGSDWKMIMDDSKRKAKSFEGNNNYDTPELRTFPALSTRFIRIYPERATHGGLGLRMELLGCGGGGSGGGGSCMEALGMESGEIHSDQITASSQASTNWSAERSRLNYPENGWTPGEDSYREWIQVDLGLLRFVTAVGTQGAIAKETKKKAYVKTYKIDVSSNGEDWITIKEGNKPVLFQGNTNPTDVVVAVFPKPLITRFVRIKPATWETGISMRFEVYGCKITDYPCSGMLGMVSGLISDSQITSSNQGDRNWMPENIRLVTSRSGWALPPAPHSYINEWLQIDLGEEKIVRGIIIQGGKHRENKVFMRKFKIGYSNNGSDWKMIMDDSKRKAKSFEGNNNYDTPELRTFPALSTRFIRIYPERATHGGLGLRMELLGCGGGGSGGGGSEPKSCDKTHTCPPCPAPELLGGPSVFLFPPKPKDTLMISRTPEVTCVVVDVSHEDPEVKFNWYVDGVEVHNAKTKPREEQYNSTYRVVSVLTVLHQDWLNGKEYKCKVSNKALPAPIEKTISKAKGQPREPQVYTLPPSRDELTKNQVSLTCLVKGFYPSDIAVEWESNGQPENNYKTTPPVLDSDGSFFLYSKLTVDKSRWQQGNVFSCSVMHEALHNHYTQKSLSLSPGK

SEQ ID NO: 142 - protein, 878 aa, Artificial Sequence
  Artificial Sequence
EDFKCMEALGMESGEIHSDQITASSQYSTNWSAERSRLNYPENGWTPGEDSYREWIQVDLGLLRFVTAVGTQGAISKETKKKYYVKTYKIDVSSNGEDWITIKEGNKPVLFQGNTNPTDVVVAVFPKPLITRFVRIKPATWETGISMRFEVYGCKITDYPCSGMLGMVSGLISDSQITSSNQGDRNWMPENIRLVTSRSGWALPPAPHSYINEWLQIDLGEEKIVRGIIIQGGKHRENKVFMRKFKIGYSNNGSDWKMIMDDSKRKAKSFEGNNNYDTPELRTFPALSTRFIRIYPERATHGGLGLRMELLGCGGGGSGGGGSEPKSCDKTHTCPPCPAPELLGGPSVFLFPPKPKDTLMISRTPEVTCVVVDVSHEDPEVKFNWYVDGVEVHNAKTKPREEQYNSTYRVVSVLTVLHQDWLNGKEYKCKVSNKALPAPIEKTISKAKGQPREPQVYTLPPSRDELTKNQVSLTCLVKGFYPSDIAVEWESNGQPENNYKTTPPVLDSDGSFFLYSKLTVDKSRWQQGNVFSCSVMHEALHNHYTQKSLSLSPGKGGGGSGGGGSCMEALGMESGEIHSDQITASSQYSTNWSAERSRLNYPENGWTPGEDSYREWIQVDLGLLRFVTAVGTQGAISKETKKKYYVKTYKIDVSSNGEDWITIKEGNKPVLFQGNTNPTDVVVAVFPKPLITRFVRIKPATWETGISMRFEVYGCKITDYPCSGMLGMVSGLISDSQITSSNQGDRNWMPENIRLVTSRSGWALPPAPHSYINEWLQIDLGEEKIVRGIIIQGGKHRENKVFMRKFKIGYSNNGSDWKMIMDDSKRKAKSFEGNNNYDTPELRTFPALSTRFIRIYPERATHGGLGLRMELLGCEVEA

SEQ ID NO: 143 - protein, 878 aa, Artificial Sequence
  Artificial Sequence
EDFKCMEALGMESGEIHSDQITASSQYSTNWSAERSRLNYPENGWTPGADSYREWIQVDLGLLRFVTAVGTQGAISKETKKKYYVKTYKIDVSSNGEDWITIKEGNKPVLFQGNTNPTDVVVAVFPKPLITRFVRIKPATWETGISMRFEVYGCKITDYPCSGMLGMVSGLISDSQITSSNQGDRNWMPENIRLVTSRSGWALPPAPHSYINEWLQIDLGEEKIVRGIIIQGGKHRENKVFMRKFKIGYSNNGSDWKMIMDDSKRKAKSFEGNNNYDTPELRTFPALSTRFIRIYPERATHGGLGLRMELLGCGGGGSGGGGSEPKSCDKTHTCPPCPAPELLGGPSVFLFPPKPKDTLMISRTPEVTCVVVDVSHEDPEVKFNWYVDGVEVHNAKTKPREEQYNSTYRVVSVLAVLHQDWLNGKEYKCKVSNKALPAPIEKTISKAKGQPREPQVYTLPPSRDELTKNQVSLTCLVKGFYPSDIAVAWESNGQPENNYKTTPPVLDSDGSFFLYSKLTVDKSRWQQGNVFSCSVMHEALHAHYTQKSLSLSPGKGGGGSGGGGSCMEALGMESGEIHSDQITASSQYSTNWSAERSRLNYPENGWTPGADSYREWIQVDLGLLRFVTAVGTQGAISKETKKKYYVKTYKIDVSSNGEDWITIKEGNKPVLFQGNTNPTDVVVAVFPKPLITRFVRIKPATWETGISMRFEVYGCKITDYPCSGMLGMVSGLISDSQITSSNQGDRNWMPENIRLVTSRSGWALPPAPHSYINEWLQIDLGEEKIVRGIIIQGGKHRENKVFMRKFKIGYSNNGSDWKMIMDDSKRKAKSFEGNNNYDTPELRTFPALSTRFIRIYPERATHGGLGLRMELLGCEVEA

SEQ ID NO: 144 - protein, 407 aa, Artificial Sequence
  Artificial Sequence
ENFQCNVPLGMESGRIANEQISASSTYSDGRWTPQQSRLHGDDNGWTPNLDSNKEYLQVDLRFLTMLTAIATQGAISRETQNGYYVKSYKLEVSTNGEDWMVYRHGKNHKVFQANNDATEVVLNKLHAPLLTRFVRIRPQTWHSGIALRLELFGCGGGGSGGGGSGGGGSGGGGSEPKSCDKTHTCPPCPAPELLGGPSVFLFPPKPKDTLMISRTPEVTCVVVDVSHEDPEVKFNWYVDGVEVHNAKTKPREEQYNSTYRVVSVLTVLHQDWLNGKEYKCKVSNKALPAPIEKTISKAKGQPREPQVYTLPPSRDELTKNQVSLTCLVKGFYPSDIAVEWESNGQPENNYKTTPPVLDSDGSFFLYSKLTVDKSRWQQGNVFSCSVMHEALHNHYTQKSLSLSPGK

SEQ ID NO: 145 - protein, 578 aa, Artificial Sequence
  Artificial Sequence
ENFQCNVPLGMESGRIANEQISASSTYSDGRWTPQQSRLHGDDNGWTPNLDSNKEYLQVDLRFLTMLTAIATQGAISRETQNGYYVKSYKLEVSTNGEDWMVYRHGKNHKVFQANNDATEVVLNKLHAPLLTRFVRIRPQTWHSGIALRLELFGCGGGGSGGGGSGGGGSGGGGSCNVPLGMESGRIANEQISASSTYSDGRWTPQQSRLHGDDNGWTPNLDSNKEYLQVDLRFLTMLTAIATQGAISRETQNGYYVKSYKLEVSTNGEDWMVYRHGKNHKVFQANNDATEVVLNKLHAPLLTRFVRIRPQTWHSGIALRLELFGCGGGGSGGGGSGGGGSGGGGSEPKSCDKTHTCPPCPAPELLGGPSVFLFPPKPKDTLMISRTPEVTCVVVDVSHEDPEVKFNWYVDGVEVHNAKTKPREEQYNSTYRVVSVLTVLHQDWLNGKEYKCKVSNKALPAPIEKTISKAKGQPREPQVYTLPPSRDELTKNQVSLTCLVKGFYPSDIAVEWESNGQPENNYKTTPPVLDSDGSFFLYSKLTVDKSRWQQGNVFSCSVMHEALHNHYTQKSLSLSPGK

SEQ ID NO: 146 - protein, 749 aa, Artificial Sequence
  Artificial Sequence
ENFQCNVPLGMESGRIANEQISASSTYSDGRWTPQQSRLHGDDNGWTPNLDSNKEYLQVDLRFLTMLTAIATQGAISRETQNGYYVKSYKLEVSTNGEDWMVYRHGKNHKVFQANNDATEVVLNKLHAPLLTRFVRIRPQTWHSGIALRLELFGCGGGGSGGGGSGGGGSGGGGSCNVPLGMESGRIANEQISASSTYSDGRWTPQQSRLHGDDNGWTPNLDSNKEYLQVDLRFLTMLTAIATQGAISRETQNGYYVKSYKLEVSTNGEDWMVYRHGKNHKVFQANNDATEVVLNKLHAPLLTRFVRIRPQTWHSGIALRLELFGCGGGGSGGGGSGGGGSGGGGSCNVPLGMESGRIANEQISASSTYSDGRWTPQQSRLHGDDNGWTPNLDSNKEYLQVDLRFLTMLTAIATQGAISRETQNGYYVKSYKLEVSTNGEDWMVYRHGKNHKVFQANNDATEVVLNKLHAPLLTRFVRIRPQTWHSGIALRLELFGCGGGGSGGGGSGGGGSGGGGSEPKSCDKTHTCPPCPAPELLGGPSVFLFPPKPKDTLMISRTPEVTCVVVDVSHEDPEVKFNWYVDGVEVHNAKTKPREEQYNSTYRVVSVLTVLHQDWLNGKEYKCKVSNKALPAPIEKTISKAKGQPREPQVYTLPPSRDELTKNQVSLTCLVKGFYPSDIAVEWESNGQPENNYKTTPPVLDSDGSFFLYSKLTVDKSRWQQGNVFSCSVMHEALHNHYTQKSLSLSPGK

SEQ ID NO: 147 - protein, 407 aa, Artificial Sequence
  Artificial Sequence
ENFQCNVPLGMESGRIANEQISASSTYSDGRWTPQQSRLHGDDNGWTPNLDSNKEYLQVDLRFLTMLTAIATQGAISRETQNGYYVKSYKLEVSTNGEDWMVYEHGKNHKVFQANNDATEVVLNKLHAPLLTRFVRIRPQTWHSGIALRLELFGCGGGGSGGGGSGGGGSGGGGSEPKSCDKTHTCPPCPAPELLGGPSVFLFPPKPKDTLMISRTPEVTCVVVDVSHEDPEVKFNWYVDGVEVHNAKTKPREEQYNSTYRVVSVLTVLHQDWLNGKEYKCKVSNKALPAPIEKTISKAKGQPREPQVYTLPPSRDELTKNQVSLTCLVKGFYPSDIAVEWESNGQPENNYKTTPPVLDSDGSFFLYSKLTVDKSRWQQGNVFSCSVMHEALHNHYTQKSLSLSPGK

SEQ ID NO: 148 - protein, 578 aa, Artificial Sequence
  Artificial Sequence
ENFQCNVPLGMESGRIANEQISASSTYSDGRWTPQQSRLHGDDNGWTPNLDSNKEYLQVDLRFLTMLTAIATQGAISRETQNGYYVKSYKLEVSTNGEDWMVYEHGKNHKVFQANNDATEVVLNKLHAPLLTRFVRIRPQTWHSGIALRLELFGCGGGGSGGGGSGGGGSGGGGSCNVPLGMESGRIANEQISASSTYSDGRWTPQQSRLHGDDNGWTPNLDSNKEYLQVDLRFLTMLTAIATQGAISRETQNGYYVKSYKLEVSTNGEDWMVYEHGKNHKVFQANNDATEVVLNKLHAPLLTRFVRIRPQTWHSGIALRLELFGCGGGGSGGGGSGGGGSGGGGSEPKSCDKTHTCPPCPAPELLGGPSVFLFPPKPKDTLMISRTPEVTCVVVDVSHEDPEVKFNWYVDGVEVHNAKTKPREEQYNSTYRVVSVLTVLHQDWLNGKEYKCKVSNKALPAPIEKTISKAKGQPREPQVYTLPPSRDELTKNQVSLTCLVKGFYPSDIAVEWESNGQPENNYKTTPPVLDSDGSFFLYSKLTVDKSRWQQGNVFSCSVMHEALHNHYTQKSLSLSPGK

SEQ ID NO: 149 - protein, 749 aa, Artificial Sequence
  Artificial Sequence
ENFQCNVPLGMESGRIANEQISASSTYSDGRWTPQQSRLHGDDNGWTPNLDSNKEYLQVDLRFLTMLTAIATQGAISRETQNGYYVKSYKLEVSTNGEDWMVYEHGKNHKVFQANNDATEVVLNKLHAPLLTRFVRIRPQTWHSGIALRLELFGCGGGGSGGGGSGGGGSGGGGSCNVPLGMESGRIANEQISASSTYSDGRWTPQQSRLHGDDNGWTPNLDSNKEYLQVDLRFLTMLTAIATQGAISRETQNGYYVKSYKLEVSTNGEDWMVYEHGKNHKVFQANNDATEVVLNKLHAPLLTRFVRIRPQTWHSGIALRLELFGCGGGGSGGGGSGGGGSGGGGSCNVPLGMESGRIANEQISASSTYSDGRWTPQQSRLHGDDNGWTPNLDSNKEYLQVDLRFLTMLTAIATQGAISRETQNGYYVKSYKLEVSTNGEDWMVYEHGKNHKVFQANNDATEVVLNKLHAPLLTRFVRIRPQTWHSGIALRLELFGCGGGGSGGGGSGGGGSGGGGSEPKSCDKTHTCPPCPAPELLGGPSVFLFPPKPKDTLMISRTPEVTCVVVDVSHEDPEVKFNWYVDGVEVHNAKTKPREEQYNSTYRVVSVLTVLHQDWLNGKEYKCKVSNKALPAPIEKTISKAKGQPREPQVYTLPPSRDELTKNQVSLTCLVKGFYPSDIAVEWESNGQPENNYKTTPPVLDSDGSFFLYSKLTVDKSRWQQGNVFSCSVMHEALHNHYTQKSLSLSPGK

SEQ ID NO: 150 - protein, 407 aa, Artificial Sequence
  Artificial Sequence
ENFQCNVPLGMESGRIANEQISASSTASDGRWTPQQSRLHGDDNGWTPNLDSNKEYLQVDLRFLTMLTAIATQGAIARETQNGAYVKSYKLEVSTNGEDWMVYEHGKNHKVFQANNDATEVVLNKLHAPLLTRFVRIRPQTWHSGIALRLELFGCGGGGSGGGGSGGGGSGGGGSEPKSCDKTHTCPPCPAPELLGGPSVFLFPPKPKDTLMISRTPEVTCVVVDVSHEDPEVKFNWYVDGVEVHNAKTKPREEQYNSTYRVVSVLTVLHQDWLNGKEYKCKVSNKALPAPIEKTISKAKGQPREPQVYTLPPSRDELTKNQVSLTCLVKGFYPSDIAVEWESNGQPENNYKTTPPVLDSDGSFFLYSKLTVDKSRWQQGNVFSCSVMHEALHNHYTQKSLSLSPGK

SEQ ID NO: 151 - protein, 749 aa, Artificial Sequence
  Artificial Sequence
ENFQCNVPLGMESGRIANEQISASSTASDGRWTPQQSRLHGDDNGWTPNLDSNKEYLQVDLRFLTMLTAIATQGAIARETQNGAYVKSYKLEVSTNGEDWMVYEHGKNHKVFQANNDATEVVLNKLHAPLLTRFVRIRPQTWHSGIALRLELFGCGGGGSGGGGSGGGGSGGGGSCNVPLGMESGRIANEQISASSTASDGRWTPQQSRLHGDDNGWTPNLDSNKEYLQVDLRFLTMLTAIATQGAIARETQNGAYVKSYKLEVSTNGEDWMVYEHGKNHKVFQANNDATEVVLNKLHAPLLTRFVRIRPQTWHSGIALRLELFGCGGGGSGGGGSGGGGSGGGGSCNVPLGMESGRIANEQISASSTASDGRWTPQQSRLHGDDNGWTPNLDSNKEYLQVDLRFLTMLTAIATQGAIARETQNGAYVKSYKLEVSTNGEDWMVYEHGKNHKVFQANNDATEVVLNKLHAPLLTRFVRIRPQTWHSGIALRLELFGCGGGGSGGGGSGGGGSGGGGSEPKSCDKTHTCPPCPAPELLGGPSVFLFPPKPKDTLMISRTPEVTCVVVDVSHEDPEVKFNWYVDGVEVHNAKTKPREEQYNSTYRVVSVLTVLHQDWLNGKEYKCKVSNKALPAPIEKTISKAKGQPREPQVYTLPPSRDELTKNQVSLTCLVKGFYPSDIAVEWESNGQPENNYKTTPPVLDSDGSFFLYSKLTVDKSRWQQGNVFSCSVMHEALHNHYTQKSLSLSPGK

SEQ ID NO: 152 - protein, 407 aa, Artificial Sequence
  Artificial Sequence
ENFQCNVPLGMESGRIANEQISASSTYSDGRWTPQQSRLHGDDNGWTPNLDSNKEYLQVDLRFLTMLTAIATQGAISRETQNGYYVKSYELEVSTNGEDWMVYEHGKNHKVFQANNDATEVVLNKLHAPLLTRFVRIRPQTWHSGIALRLELFGCGGGGSGGGGSGGGGSGGGGSEPKSCDKTHTCPPCPAPELLGGPSVFLFPPKPKDTLMISRTPEVTCVVVDVSHEDPEVKFNWYVDGVEVHNAKTKPREEQYNSTYRVVSVLTVLHQDWLNGKEYKCKVSNKALPAPIEKTISKAKGQPREPQVYTLPPSRDELTKNQVSLTCLVKGFYPSDIAVEWESNGQPENNYKTTPPVLDSDGSFFLYSKLTVDKSRWQQGNVFSCSVMHEALHNHYTQKSLSLSPGK

SEQ ID NO: 153 - protein, 749 aa, Artificial Sequence
  Artificial Sequence
ENFQCNVPLGMESGRIANEQISASSTYSDGRWTPQQSRLHGDDNGWTPNLDSNKEYLQVDLRFLTMLTAIATQGAISRETQNGYYVKSYELEVSTNGEDWMVYEHGKNHKVFQANNDATEVVLNKLHAPLLTRFVRIRPQTWHSGIALRLELFGCGGGGSGGGGSGGGGSGGGGSCNVPLGMESGRIANEQISASSTYSDGRWTPQQSRLHGDDNGWTPNLDSNKEYLQVDLRFLTMLTAIATQGAISRETQNGYYVKSYELEVSTNGEDWMVYEHGKNHKVFQANNDATEVVLNKLHAPLLTRFVRIRPQTWHSGIALRLELFGCGGGGSGGGGSGGGGSGGGGSCNVPLGMESGRIANEQISASSTYSDGRWTPQQSRLHGDDNGWTPNLDSNKEYLQVDLRFLTMLTAIATQGAISRETQNGYYVKSYELEVSTNGEDWMVYEHGKNHKVFQANNDATEVVLNKLHAPLLTRFVRIRPQTWHSGIALRLELFGCGGGGSGGGGSGGGGSGGGGSEPKSCDKTHTCPPCPAPELLGGPSVFLFPPKPKDTLMISRTPEVTCVVVDVSHEDPEVKFNWYVDGVEVHNAKTKPREEQYNSTYRVVSVLTVLHQDWLNGKEYKCKVSNKALPAPIEKTISKAKGQPREPQVYTLPPSRDELTKNQVSLTCLVKGFYPSDIAVEWESNGQPENNYKTTPPVLDSDGSFFLYSKLTVDKSRWQQGNVFSCSVMHEALHNHYTQKSLSLSPGK

SEQ ID NO: 154 - protein, 562 aa, Artificial Sequence
  Artificial Sequence
ENFQCNVPLGMESGRIANEQISASSTYSDGRWTPQQSRLHGDDNGWTPNLDSNKEYLQVDLRFLTMLTAIATQGAISRETQNGYYVKSYKLEVSTNGEDWMVYRHGKNHKVFQANNDATEVVLNKLHAPLLTRFVRIRPQTWHSGIALRLELFGCRVTDAPCSNMLGMLSGLIADSQISASSTQEYLWSPSAARLVSSRSGWFPRIPQAQPGEEWLQVDLGTPKTVKGVIIQGARGGDSITAVEARAFVRKFKVSYSLNGKDWEYIQDPRTQQPKLFEGNMHYDTPDIRRFDPIPAQYVRVYPERWSPAGIGMRLEVLGCGGGGSGGGGSEPKSCDKTHTCPPCPAPELLGGPSVFLFPPKPKDTLMISRTPEVTCVVVDVSHEDPEVKFNWYVDGVEVHNAKTKPREEQYNSTYRVVSVLTVLHQDWLNGKEYKCKVSNKALPAPIEKTISKAKGQPREPQVYTLPPSRDELTKNQVSLTCLVKGFYPSDIAVEWESNGQPENNYKTTPPVLDSDGSFFLYSKLTVDKSRWQQGNVFSCSVMHEALHNHYTQKSLSLSPGK

SEQ ID NO: 155 - protein, 559 aa, Artificial Sequence
  Artificial Sequence
ENFQCNVPLGMESGRIANEQISASSTYSDGRWTPQQSRLHGDDNGWTPNLDSNKEYLQVDLRFLTMLTAIATQGAISRETQNGYYVKSYKLEVSTNGEDWMVYRHGKNHKVFQANNDATEVVLNKLHAPLLTRFVRIRPQTWHSGIALRLELFGCRVTDAPCSNMLGMLSGLIADSQISASSTQEYLWSPSAARLVSSRSGWFPRIPQAQPGEEWLQVDLGTPKTVKGVIIQGARGGDSITAVEARAFVAAFAVSYSLNGKDWEYIQDPRTQQPKLFEGNMHYDTPDIRRFDPIPAQYVRVYPERWSPAGIGMRLEVLGCDWTDGAPAPAGAPAPATCPPCPAPELLGGPSVFLFPPKPKDTLMISRTPEVTCVVVDVSHEDPEVKFNWYVDGVEVHNAKTKPREEQYNSTYRVVSVLTVLHQDWLNGKEYKCKVSNKALPAPIEKTISKAKGQPREPQVYTLPPSRDELTKNQVSLTCLVKGFYPSDIAVEWESNGQPENNYKTTPPVLDSDGSFFLYSKLTVDKSRWQQGNVFSCSVMHEALHNHYTQKSLSLSPGK

SEQ ID NO: 156 - protein, 559 aa, Artificial Sequence
  Artificial Sequence
ENFQCNVPLGMESGRIANEQISASSTYSDGRWTPQQSRLHGDDNGWTPNLDSNKEYLQVDLRFLTMLTAIATQGAISRETQNGYYVKSYKLEVSTNGEDWMVYRHGKNHKVFQANNDATEVVLNKLHAPLLTRFVRIRPQTWHSGIALRLELFGCRVTDAPCSNMLGMLSGLIADSQISASSTQEYLWSPSAARLVSSRSGWFPRIPQAQPGEEWLQVDLGTPKTVKGVIIQGARGGDSITAVEARAFVEEFEVSYSLNGKDWEYIQDPRTQQPKLFEGNMHYDTPDIRRFDPIPAQYVRVYPERWSPAGIGMRLEVLGCDWTDGAPAPAGAPAPATCPPCPAPELLGGPSVFLFPPKPKDTLMISRTPEVTCVVVDVSHEDPEVKFNWYVDGVEVHNAKTKPREEQYNSTYRVVSVLTVLHQDWLNGKEYKCKVSNKALPAPIEKTISKAKGQPREPQVYTLPPSRDELTKNQVSLTCLVKGFYPSDIAVEWESNGQPENNYKTTPPVLDSDGSFFLYSKLTVDKSRWQQGNVFSCSVMHEALHNHYTQKSLSLSPGK

SEQ ID NO: 157 - protein, 559 aa, Artificial Sequence
  Artificial Sequence
TCPPCPAPEFLGGPSVFLFPPKPKDTLMISRTPEVTCVVVDVSQEDPEVQFNWYVDGVEVHNAKTKPREEQFNSTYRVVSVLTVLHQDWLNGKEYKCKVSNKGLPSSIEKTISKAKGQPREPQVYTLPPSQEEMTENQVSLTCLVKGFYPSDIAVEWESNGQPENNYKTTPPVLDSDGSFFLYSWLTVDKSRWQEGNVFSCSVMHEALHNHYTQKSLSLSLGKGAPAPAGAPAPAENFQCNVPLGMESGRIANEQISASSTYSDGRWTPQQSRLHGDDNGWTPNLDSNKEYLQVDLRFLTMLTAIATQGAISRETQNGYYVKSYKLEVSTNGEDWMVYRHGKNHKVFQANNDATEVVLNKLHAPLLTRFVRIRPQTWHSGIALRLELFGCRVTDAPCSNMLGMLSGLIADSQISASSTQEYLWSPSAARLVSSRSGWFPRIPQAQPGEEWLQVDLGTPKTVKGVIIQGARGGDSITAVEARAFVRKFKVSYSLNGKDWEYIQDPRTQQPKLFEGNMHYDTPDIRRFDPIPAQYVRVYPERWSPAGIGMRLEVLGCDWTD

SEQ ID NO: 158 - protein, 555 aa, Artificial Sequence
  Artificial Sequence
TCPPCPAPEFLGGPSVFLFPPKPKDTLMISRTPEVTCVVVDVSQEDPEVQFNWYVDGVEVHNAKTKPREEQFNSTYRVVSVLTVLHQDWLNGKEYKCKVSNKGLPSSIEKTISKAKGQPREPQVYTLPPSQEEMTENQVSLTCLVKGFYPSDIAVEWESNGQPENNYKTTPPVLDSDGSFFLYSWLTVDKSRWQEGNVFSCSVMHEALHNHYTQKSLSLSLGKGAPAPAGAPAPACNVPLGMESGRIANEQISASSTASDGRWTPQQSRLHGDDNGWAPNLASNKEYLQVDLRFLTMLTAIATQGAISRETQNGYYVKSYKLEVSTNGEDWMVYRHGKNHKVFQANNDATEVVLNKLHAPLLTRFVRIRPQTWHSGIALRLELFGCRVTDAPCSNMLGMLSGLIADSQISASSTQEYLWSPSAARLVSSRSGWFPRIPQAQPGEEWLQVDLGTPKTVKGVIIQGARGGDSITAVEARAFVEEFEVSYSLNGKDWEYIQDPRTQQPKLFEGNMHYDTPDIRRFDPIPAQYVRVYPERWSPAGIGMRLEVLGCDWTD

SEQ ID NO: 159 - protein, 555 aa, Artificial Sequence
  Artificial Sequence
TCPPCPAPEFLGGPSVFLFPPKPKDTLMISRTPEVTCVVVDVSQEDPEVQFNWYVDGVEVHNAKTKPREEQFNSTYRVVSVLTVLHQDWLNGKEYKCKVSNKGLPSSIEKTISKAKGQPREPQVYTLPPSQEEMTENQVSLTCLVKGFYPSDIAVEWESNGQPENNYKTTPPVLDSDGSFFLYSWLTVDKSRWQEGNVFSCSVMHEALHNHYTQKSLSLSLGKGAPAPAGAPAPACNVPLGMESGRIANEQISASSTASDGRWTPQQSRLHGDDNGWAPNLASNKEYLQVDLRFLTMLTAIATQGAISRETQNGYYVKSYKLEVSTNGEDWMVYRHGKNHKVFQANNDATEVVLNKLHAPLLTRFVRIRPQTWHSGIALRLELFGCRVTDAPCSNMLGMLSGLIADSQISASSTQEYLWSPSAARLVSSRSGWFPRIPQAQPGEEWLQVDLGTPKTVKGVIIQGARGGDSITAVEARAFVAAFAVSYSLNGKDWEYIQDPRTQQPKLFEGNMHYDTPDIRRFDPIPAQYVRVYPERWSPAGIGMRLEVLGCDWTD

SEQ ID NO: 160 - protein, 582 aa, Artificial Sequence
  Artificial Sequence
ENFQCNVPLGMESGRIANEQISASSTYSDGRWTPQQSRLHGDDNGWTPNLDSNKEYLQVDLRFLTMLTAIATQGAISRETQNGYYVKSYKLEVSTNGEDWMVYRHGKNHKVFQANNDATEVVLNKLHAPLLTRFVRIRPQTWHSGIALRLELFGCGGGGSGGGGSGGGGSGGGGSEPKSCDKTHTCPPCPAPELLGGPSVFLFPPKPKDTLMISRTPEVTCVVVDVSHEDPEVKFNWYVDGVEVHNAKTKPREEQYNSTYRVVSVLTVLHQDWLNGKEYKCKVSNKALPAPIEKTISKAKGQPREPQVYTLPPSRDELTKNQVSLTCLVKGFYPSDIAVEWESNGQPENNYKTTPPVLDSDGSFFLYSKLTVDKSRWQQGNVFSCSVMHEALHNHYTQKSLSLSPGKGGGGSGGGGSGGGGSGGGGSCNVPLGMESGRIANEQISASSTYSDGRWTPQQSRLHGDDNGWTPNLDSNKEYLQVDLRFLTMLTAIATQGAISRETQNGYYVKSYKLEVSTNGEDWMVYRHGKNHKVFQANNDATEVVLNKLHAPLLTRFVRIRPQTWHSGIALRLELFGCDWTD

SEQ ID NO: 161 - protein, 753 aa, Artificial Sequence
  Artificial Sequence
ENFQCNVPLGMESGRIANEQISASSTYSDGRWTPQQSRLHGDDNGWTPNLDSNKEYLQVDLRFLTMLTAIATQGAISRETQNGYYVKSYKLEVSTNGEDWMVYRHGKNHKVFQANNDATEVVLNKLHAPLLTRFVRIRPQTWHSGIALRLELFGCGGGGSGGGGSGGGGSGGGGSCNVPLGMESGRIANEQISASSTYSDGRWTPQQSRLHGDDNGWTPNLDSNKEYLQVDLRFLTMLTAIATQGAISRETQNGYYVKSYKLEVSTNGEDWMVYRHGKNHKVFQANNDATEVVLNKLHAPLLTRFVRIRPQTWHSGIALRLELFGCGGGGSGGGGSGGGGSGGGGSEPKSCDKTHTCPPCPAPELLGGPSVFLFPPKPKDTLMISRTPEVTCVVVDVSHEDPEVKFNWYVDGVEVHNAKTKPREEQYNSTYRVVSVLTVLHQDWLNGKEYKCKVSNKALPAPIEKTISKAKGQPREPQVYTLPPSRDELTKNQVSLTCLVKGFYPSDIAVEWESNGQPENNYKTTPPVLDSDGSFFLYSKLTVDKSRWQQGNVFSCSVMHEALHNHYTQKSLSLSPGKGGGGSGGGGSGGGGSGGGGSCNVPLGMESGRIANEQISASSTYSDGRWTPQQSRLHGDDNGWTPNLDSNKEYLQVDLRFLTMLTAIATQGAISRETQNGYYVKSYKLEVSTNGEDWMVYRHGKNHKVFQANNDATEVVLNKLHAPLLTRFVRIRPQTWHSGIALRLELFGCDWTD

SEQ ID NO: 162 - protein, 582 aa, Artificial Sequence
  Artificial Sequence
ENFQCNVPLGMESGRIANEQISASSTYSDGRWTPQQSRLHGDDNGWTPNLDSNKEYLQVDLRFLTMLTAIATQGAISRETQNGYYVKSYKLEVSTNGEDWMVYEHGKNHKVFQANNDATEVVLNKLHAPLLTRFVRIRPQTWHSGIALRLELFGCGGGGSGGGGSGGGGSGGGGSEPKSCDKTHTCPPCPAPELLGGPSVFLFPPKPKDTLMISRTPEVTCVVVDVSHEDPEVKFNWYVDGVEVHNAKTKPREEQYNSTYRVVSVLTVLHQDWLNGKEYKCKVSNKALPAPIEKTISKAKGQPREPQVYTLPPSRDELTKNQVSLTCLVKGFYPSDIAVEWESNGQPENNYKTTPPVLDSDGSFFLYSKLTVDKSRWQQGNVFSCSVMHEALHNHYTQKSLSLSPGKGGGGSGGGGSGGGGSGGGGSCNVPLGMESGRIANEQISASSTYSDGRWTPQQSRLHGDDNGWTPNLDSNKEYLQVDLRFLTMLTAIATQGAISRETQNGYYVKSYKLEVSTNGEDWMVYEHGKNHKVFQANNDATEVVLNKLHAPLLTRFVRIRPQTWHSGIALRLELFGCDWTD

SEQ ID NO: 163 - protein, 753 aa, Artificial Sequence
  Artificial Sequence
ENFQCNVPLGMESGRIANEQISASSTYSDGRWTPQQSRLHGDDNGWTPNLDSNKEYLQVDLRFLTMLTAIATQGAISRETQNGYYVKSYKLEVSTNGEDWMVYEHGKNHKVFQANNDATEVVLNKLHAPLLTRFVRIRPQTWHSGIALRLELFGCGGGGSGGGGSGGGGSGGGGSCNVPLGMESGRIANEQISASSTYSDGRWTPQQSRLHGDDNGWTPNLDSNKEYLQVDLRFLTMLTAIATQGAISRETQNGYYVKSYKLEVSTNGEDWMVYEHGKNHKVFQANNDATEVVLNKLHAPLLTRFVRIRPQTWHSGIALRLELFGCGGGGSGGGGSGGGGSGGGGSEPKSCDKTHTCPPCPAPELLGGPSVFLFPPKPKDTLMISRTPEVTCVVVDVSHEDPEVKFNWYVDGVEVHNAKTKPREEQYNSTYRVVSVLTVLHQDWLNGKEYKCKVSNKALPAPIEKTISKAKGQPREPQVYTLPPSRDELTKNQVSLTCLVKGFYPSDIAVEWESNGQPENNYKTTPPVLDSDGSFFLYSKLTVDKSRWQQGNVFSCSVMHEALHNHYTQKSLSLSPGKGGGGSGGGGSGGGGSGGGGSCNVPLGMESGRIANEQISASSTYSDGRWTPQQSRLHGDDNGWTPNLDSNKEYLQVDLRFLTMLTAIATQGAISRETQNGYYVKSYKLEVSTNGEDWMVYEHGKNHKVFQANNDATEVVLNKLHAPLLTRFVRIRPQTWHSGIALRLELFGCDWTD

SEQ ID NO: 164 - protein, 569 aa, Artificial Sequence
  Artificial Sequence
EDFKCMEALGMESGEIHSDQITASSQYSTNWSAERSRLNYPENGWTPGEDSYREWIQVDLGLLRFVTAVGTQGAISKETKKKYYVKTYKIDVSSNGEDWITIKEGNKPVLFQGNTNPTDVVVAVFPKPLITRFVRIKPATWETGISMRFEVYGCGAPAPAGAPAPACSNMLGMLSGLIADSQISASSTQEYLWSPSAARLVSSRSGWFPRIPQAQPGEEWLQVDLGTPKTVKGVIIQGARGGDSITAVEARAFVRKFKVSYSLNGKDWEYIQDPRTQQPKLFEGNMHYDTPDIRRFDPIPAQYVRVYPERWSPAGIGMRLEVLGCGAPAPAGAPAPAEPKSCDKTHTCPPCPAPELLGGPSVFLFPPKPKDTLMISRTPEVTCVVVDVSHEDPEVKFNWYVDGVEVHNAKTKPREEQYNSTYRVVSVLTVLHQDWLNGKEYKCKVSNKALPAPIEKTISKAKGQPREPQVYTLPPSRDELTKNQVSLTCLVKGFYPSDIAVEWESNGQPENNYKTTPPVLDSDGSFFLYSKLTVDKSRWQQGNVFSCSVMHEALHNHYTQKSLSLSPGK

SEQ ID NO: 165 - protein, 564 aa, Artificial Sequence
  Artificial Sequence
ENFQCNVPLGMESGRIANEQISASSTYSDGRWTPQQSRLHGDDNGWTPNLDSNKEYLQVDLRFLTMLTAIATQGAISRETQNGYYVKSYKLEVSTNGEDWMVYRHGKNHKVFQANNDATEVVLNKLHAPLLTRFVRIRPQTWHSGIALRLELFGCGAPAPAGAPAPACSGMLGMVSGLISDSQITSSNQGDRNWMPENIRLVTSRSGWALPPAPHSYINEWLQIDLGEEKIVRGIIIQGGKHRENKVFMRKFKIGYSNNGSDWKMIMDDSKRKAKSFEGNNNYDTPELRTFPALSTRFIRIYPERATHGGLGLRMELLGCGAPAPAGAPAPAEPKSCDKTHTCPPCPAPELLGGPSVFLFPPKPKDTLMISRTPEVTCVVVDVSHEDPEVKFNWYVDGVEVHNAKTKPREEQYNSTYRVVSVLTVLHQDWLNGKEYKCKVSNKALPAPIEKTISKAKGQPREPQVYTLPPSRDELTKNQVSLTCLVKGFYPSDIAVEWESNGQPENNYKTTPPVLDSDGSFFLYSKLTVDKSRWQQGNVFSCSVMHEALHNHYTQKSLSLSPGK

SEQ ID NO: 166 - protein, 569 aa, Artificial Sequence
  Artificial Sequence
EDFKCMEALGMESGEIHSDQITASSQASTNWSAERSRLNYPENGWTPGEDSYREWIQVDLGLLRFVTAVGTQGAIAKETKKKAYVKTYKIDVSSNGEDWITIKEGNKPVLFQGNTNPTDVVVAVFPKPLITRFVRIKPATWETGISMRFEVYGCGAPAPAGAPAPACSNMLGMLSGLIADSQISASSTQEYLWSPSAARLVSSRSGWFPRIPQAQPGEEWLQVDLGTPKTVKGVIIQGARGGDSITAVEARAFVRKFKVSYSLNGKDWEYIQDPRTQQPKLFEGNMHYDTPDIRRFDPIPAQYVRVYPERWSPAGIGMRLEVLGCGAPAPAGAPAPAEPKSCDKTHTCPPCPAPELLGGPSVFLFPPKPKDTLMISRTPEVTCVVVDVSHEDPEVKFNWYVDGVEVHNAKTKPREEQYNSTYRVVSVLTVLHQDWLNGKEYKCKVSNKALPAPIEKTISKAKGQPREPQVYTLPPSRDELTKNQVSLTCLVKGFYPSDIAVEWESNGQPENNYKTTPPVLDSDGSFFLYSKLTVDKSRWQQGNVFSCSVMHEALHNHYTQKSLSLSPGK

SEQ ID NO: 167 - protein, 788 aa, Artificial Sequence
  N1(a1a2b1b2)-Fc
FRNDKCGDTIKIESPGYLTSPGYPHSYHPSEKCEWLIQAPDPYQRIMINFNPHFDLEDRDCKYDYVEVFDGENENGHFRGKFCGKIAPPPVVSSGPFLFIKFVSDYETHGAGFSIRYEIFKRGPECSQNYTTPSGVIKSPGFPEKYPNSLECTYIVFVPKMSEIILEFESFDLEPDSNPPGGMFCRYDRLEIWDGFPDVGPHIGRYCGQKTPGRIRSSSGILSMVFYTDSAIAKEGFSANYSVLQSSVSEDFKCMEALGMESGEIHSDQITASSQYSTNWSAERSRLNYPENGWTPGEDSYREWIQVDLGLLRFVTAVGTQGAISKETKKKYYVKTYKIDVSSNGEDWITIKEGNKPVLFQGNTNPTDVVVAVFPKPLITRFVRIKPATWETGISMRFEVYGCKITDYPCSGMLGMVSGLISDSQITSSNQGDRNWMPENIRLVTSRSGWALPPAPHSYINEWLQIDLGEEKIVRGIIIQGGKHRENKVFMRKFKIGYSNNGSDWKMIMDDSKRKAKSFEGNNNYDTPELRTFPALSTRFIRIYPERATHGGLGLRMELLGCEVEAECPPCPAPPVAGPSVFLFPPKPKDTLMISRTPEVTCVVVDVSHEDPEVQFNWYVDGVEVHNAKTKPREEQFNSTFRVVSVLTVVHQDWLNGKEYKCKVSNKGLPAPIEKTISKTKGQPREPQVYTLPPSREEMTKNQVSLTCLVKGFYPSDISVEWESNGQPENNYKTTPPMLDSDGSFFLYSKLTVDKSRWQQGNVFSCSVMHEALHNHYTQKSLSLSPGK

SEQ ID NO: 168 - protein, 565 aa, Artificial Sequence
  N1(a2b1)-Fc
FRGKFCGKIAPPPVVSSGPFLFIKFVSDYETHGAGFSIRYEIFKRGPECSQNYTTPSGVIKSPGFPEKYPNSLECTYIVFVPKMSEIILEFESFDLEPDSNPPGGMFCRYDRLEIWDGFPDVGPHIGRYCGQKTPGRIRSSSGILSMVFYTDSAIAKEGFSANYSVLQSSVSEDFKCMEALGMESGEIHSDQITASSQYSTNWSAERSRLNYPENGWTPGEDSYREWIQVDLGLLRFVTAVGTQGAISKETKKKYYVKTYKIDVSSNGEDWITIKEGNKPVLFQGNTNPTDVVVAVFPKPLITRFVRIKPATWETGISMRFEVYGCKITDYPEPRGPTIKPCPPCKCPAPNLLGGPSVFIFPPKIKDVLMISLSPIVTCVVVDVSEDDPDVQISWFVNNVEVHTAQTQTHREDYNSTLRVVSALPIQHQDWMSGKEFKCKVNNKDLPAPIERTISKPKGSVRAPQVYVLPPPEEEMTKKQVTLTCMVTDFMPEDIYVEWTNNGKTELNYKNTEPVLDSDGSYFMYSKLRVEKKNWVERNSYSCSVVHEGLHNHHTTKSFSRTPGK

SEQ ID NO: 169 - protein, 14 aa, Dengue virus
GTCTQSGERRREKR

SEQ ID NO: 170 - protein, 14 aa, Respiratory syncytial virus
KNTNVTLSKKRKRR

SEQ ID NO: 171 - protein, 14 aa, Hantavirus
LTHKMIEESHRLRR

SEQ ID NO: 172 - protein, 14 aa, Epstein-Barr virus
VSFKPPPPPSRRRR

SEQ ID NO: 173 - protein, 20 aa, Epstein-Barr virus
  Epstein-Barr (1)..(20): uncleaved
  Epstein-Barr virus (uncleaved) (1)..(20)
VSFKPPPPPSRRRRGACVVY

SEQ ID NO: 174 - protein, 15 aa, SARS-CoV-2 Wuhan
CASYQTQTNSPRRAR

SEQ ID NO: 175 - protein, 30 aa, SARS-CoV-2 Wuhan
  SARS-CoV-2 Wuhan (uncleaved) (1)..(30)
CASYQTQTNSPRRARSVASQSIIAYTMSLG

SEQ ID NO: 176 - protein, 14 aa, SARS-CoV-2 UK
ASYQTQTNSHRRAR

SEQ ID NO: 177 - protein, 14 aa, SARS-CoV-2 India
ASYQTQTNSRRRAR

SEQ ID NO: 178 - protein, 24 aa, SARS-CoV-2 India
  SARS-CoV-2 India (uncleaved) (1)..(24)
ASYQTQTNSRRRARSVASQSIIAY

SEQ ID NO: 179 - protein, 15 aa, HCoV-OC43
GSGYCVDYSKNRRSR

SEQ ID NO: 180 - protein, 15 aa, MERS-CoV
LLEPVSISTGSRSAR

SEQ ID NO: 181 - protein, 25 aa, MERS-CoV
  MERS-CoV (uncleaved) (1)..(25)
LLEPVSISTGSRSARSAIEDLLFDK

SEQ ID NO: 182 - protein, 15 aa, Herpes simplex virus 1
ERPRAPARSASRPRR

SEQ ID NO: 183 - protein, 17 aa, Herpes simplex virus 1
  Herpes Simplex virus-1 (uncleaved) (1)..(17)
ERPRAPARSASRPRRPV

SEQ ID NO: 184 - protein, 15 aa, IAV H5N1
VLATGLRNVPQRKKR

SEQ ID NO: 185 - protein, 15 aa, Human papillomavirus
PTTSSTSTTAKRKKR

SEQ ID NO: 186 - protein, 14 aa, Human Metapneumovirus
IDMLKARVKNRVAR

SEQ ID NO: 187 - protein, 11 aa, Human Immunodeficiency virus
AKRRVVQREKR

SEQ ID NO: 188 - protein, 21 aa, Human Immunodeficiency virus
  Human Immunodeficiency virus (uncleaved) (1)..(21)
AKRRVVQREKRAVGIGALFLG

SEQ ID NO: 189 - protein, 450 aa, Artificial Sequence
  anti-SARS-CoV-2 anitbody Heavy chain
QVQLVESGGGLVKPGGSLRLSCAASGFTFSDYYMSWIRQAPGKGLEWVSYITYSGSTIYYADSVKGRFTISRDNAKSSLYLQMNSLRAEDTAVYYCARDRGTTMVPFDYWGQGTLVTVSSASTKGPSVFPLAPSSKSTSGGTAALGCLVKDYFPEPVTVSWNSGALTSGVHTFPAVLQSSGLYSLSSVVTVPSSSLGTQTYICNVNHKPSNTKVDKKVEPKSCDKTHTCPPCPAPELLGGPSVFLFPPKPKDTLMISRTPEVTCVVVDVSHEDPEVKFNWYVDGVEVHNAKTKPREEQYNSTYRVVSVLTVLHQDWLNGKEYKCKVSNKALPAPIEKTISKAKGQPREPQVYTLPPSRDELTKNQVSLTCLVKGFYPSDIAVEWESNGQPENNYKTTPPVLDSDGSFFLYSKLTVDKSRWQQGNVFSCSVMHEALHNHYTQKSLSLSPGK

SEQ ID NO: 190 - protein, 214 aa, Artificial Sequence
  anti-SARS-CoV-2 anitbody Light chain
DIQMTQSPSSLSASVGDRVTITCQASQDITNYLNWYQQKPGKAPKLLIYAASNLETGVPSRFSGSGSGTDFTFTISGLQPEDIATYYCQQYDNLPLTFGGGTKVEIKRTVAAPSVFIFPPSDEQLKSGTASVVCLLNNFYPREAKVQWKVDNALQSGNSQESVTEQDSKDSTYSLSSTLTLSKADYEKHKVYACEVTHQGLSSPVTKSFNRGEC

SEQ ID NO: 191 - protein, 555 aa, Artificial Sequence
  Artificial Sequence
EDFKCMEALGMESGEIHSDQITASSQYSTNWSAERSRLNYPENGWTPGEDSYREWIQVDLGLLRFVTAVGTQGAISKETKKKYYVKTYKIDVSSNGEDWITIKEGNKPVLFQGNTNPTDVVVAVFPKPLITRFVRIKPATWETGISMRFEVYGCKITDYPCSGMLGMVSGLISDSQITSSNQGDRNWMPENIRLVTSRSGWALPPAPHSYINEWLQIDLGEEKIVRGIIIQGGKHRENKVFMRKFKIGYSNNGSDWKMIMDDSKRKAKSFEGNNNYDTPELRTFPALSTRFIRIYPERATHGGLGLRMELLGCGGGGSGGGGSEPKSCDKTHTCPPCPAPELLGGPSVFLFPPKPKDTLMISRTPEVTCVVVDVSHEDPEVKFNWYVDGVEVHNAKTKPREEQYNSTYRVVSVLAVLHQDWLNGKEYKCKVSNKALPAPIEKTISKAKGQPREPQVYTLPPSRDELTKNQVSLTCLVKGFYPSDIAVAWESNGQPENNYKTTPPVLDSDGSFFLYSKLTVDKSRWQQGNVFSCSVMHEALHAHYTQKSLSLSPGK

SEQ ID NO: 192 - protein, 601 aa, Artificial Sequence
  Artificial Sequence
EDFKCMEALGMESGEIHSDQITASSQYSTNWSAERSRLNYPENGWTPGEDSYREWIQVDLGLLRFVTAVGTQGAISKETKKKYYVKTYKIDVSSNGEDWITIKEGNKPVLFQGNTNPTDVVVAVFPKPLITRFVRIKPATWETGISMRFEVYGCKITDYPCSGMLGMVSGLISDSQITSSNQGDRNWMPENIRLVTSRSGWALPPAPHSYINEWLQIDLGEEKIVRGIIIQGGKHRENKVFMRKFKIGYSNNGSDWKMIMDDSKRKAKSFEGNNNYDTPELRTFPALSTRFIRIYPERATHGGLGLRMELLGCGGGGSGGGGSEPKSCDKTHTCPPCPAPELLGGPSVFLFPPKPKDTLMISRTPEVTCVVVDVSHEDPEVKFNWYVDGVEVHNAKTKPREEQYNSTYRVVSVLTVLHQDWLNGKEYKCKVSNKALPAPIEKTISKAKGQPREPQVYTLPPSRDELTKNQVSLTCLVKGFYPSDIAVEWESNGQPENNYKTTPPVLDSDGSFFLYSKLTVDKSRWQQGNVFSCSVMHEALHNHYTQKSLSLSPGKGGGGSGGGGSGGGGSEEQAKTFLDKFNHEAEDLFYQSSGLGKGDFR

SEQ ID NO: 193 - protein, 555 aa, Artificial Sequence
  Artificial Sequence
EDFKCMEALGMESGEIHSDQITASSQASTNWSAERSRLNYPENGWTPGEDSYREWIQVDLGLLRFVTAVGTQGAIAKETKKKAYVKTYKIDVSSNGEDWITIKEGNKPVLFQGNTNPTDVVVAVFPKPLITRFVRIKPATWETGISMRFEVYGCKITDYPCSGMLGMVSGLISDSQITSSNQGDRNWMPENIRLVTSRSGWALPPAPHSYINEWLQIDLGEEKIVRGIIIQGGKHRENKVFMRKFKIGYSNNGSDWKMIMDDSKRKAKSFEGNNNYDTPELRTFPALSTRFIRIYPERATHGGLGLRMELLGCGGGGSGGGGSEPKSCDKTHTCPPCPAPELLGGPSVFLFPPKPKDTLMISRTPEVTCVVVDVSHEDPEVKFNWYVDGVEVHNAKTKPREEQYNSTYRVVSVLTVLHQDWLNGKEYKCKVSNKALPAPIEKTISKAKGQPREPQVYTLPPSRDELTKNQVSLTCLVKGFYPSDIAVEWESNGQPENNYKTTPPVLDSDGSFFLYSKLTVDKSRWQQGNVFSCSVMHEALHNHYTQKSLSLSPGK

SEQ ID NO: 194 - protein, 564 aa, Artificial Sequence
  Artificial Sequence
ENFQCNVPLGMESGRIANEQISASSTYSDGRWTPQQSRLHGDDNGWTPNLDSNKEYLQVDLRFLTMLTAIATQGAISRETQNGYYVKSYKLEVSTNGEDWMVYRHGKNHKVFQANNDATEVVLNKLHAPLLTRFVRIRPQTWHSGIALRLELFGCRVTDAPCSNMLGMLSGLIADSQISASSTQEYLWSPSAARLVSSRSGWFPRIPQAQPGEEWLQVDLGTPKTVKGVIIQGARGGDSITAVEARAFVRKFKVSYSLNGKDWEYIQDPRTQQPKLFEGNMHYDTPDIRRFDPIPAQYVRVYPERWSPAGIGMRLEVLGCGAPAPAGAPAPAEPKSCDKTHTCPPCPAPELLGGPSVFLFPPKPKDTLMISRTPEVTCVVVDVSHEDPEVKFNWYVDGVEVHNAKTKPREEQYNSTYRVVSVLTVLHQDWLNGKEYKCKVSNKALPAPIEKTISKAKGQPREPQVYTLPPSRDELTKNQVSLTCLVKGFYPSDIAVEWESNGQPENNYKTTPPVLDSDGSFFLYSKLTVDKSRWQQGNVFSCSVMHEALHNHYTQKSLSLSPGK

SEQ ID NO: 195 - protein, 406 aa, Artificial Sequence
  Artificial Sequence
EDFKCMEALGMESGEIHSDQITASSQYSTNWSAERSRLNYPENGWTPGEDSYREWIQVDLGLLRFVTAVGTQGAISKETKKKYYVKTYKIDVSSNGEDWITIKEGNKPVLFQGNTNPTDVVVAVFPKPLITRFVRIKPATWETGISMRFEVYGCGGGGSGGGGSGGGGSGGGGSEPKSCDKTHTCPPCPAPELLGGPSVFLFPPKPKDTLMISRTPEVTCVVVDVSHEDPEVKFNWYVDGVEVHNAKTKPREEQYNSTYRVVSVLTVLHQDWLNGKEYKCKVSNKALPAPIEKTISKAKGQPREPQVYTLPPSRDELTKNQVSLTCLVKGFYPSDIAVEWESNGQPENNYKTTPPVLDSDGSFFLYSKLTVDKSRWQQGNVFSCSVMHEALHNHYTQKSLSLSPGK

SEQ ID NO: 196 - protein, 584 aa, Artificial Sequence
  Artificial Sequence
EDFKCMEALGMESGEIHSDQITASSQYSTNWSAERSRLNYPENGWTPGEDSYREWIQVDLGLLRFVTAVGTQGAISKETKKKYYVKTYKIDVSSNGEDWITIEEGNKPVLFQGNTNPTDVVVAVFPKPLITRFVRIKPATWETGISMRFEVYGCGAPAPAGAPAPAGAPAPAGAPAPACMEALGMESGEIHSDQITASSQYSTNWSAERSRLNYPENGWTPGEDSYREWIQVDLGLLRFVTAVGTQGAISKETKKKYYVKTYKIDVSSNGEDWITIEEGNKPVLFQGNTNPTDVVVAVFPKPLITRFVRIKPATWETGISMRFEVYGCGAPAPAGAPAPAGAPAPAGAPAPAEPKSCDKTHTCPPCPAPELLGGPSVFLFPPKPKDTLMISRTPEVTCVVVDVSHEDPEVKFNWYVDGVEVHNAKTKPREEQYNSTYRVVSVLTVLHQDWLNGKEYKCKVSNKALPAPIEKTISKAKGQPREPQVYTLPPSRDELTKNQVSLTCLVKGFYPSDIAVEWESNGQPENNYKTTPPVLDSDGSFFLYSKLTVDKSRWQQGNVFSCSVMHEALHNHYTQKSLSLSPGK

SEQ ID NO: 197 - protein, 758 aa, Artificial Sequence
  Artificial Sequence
EDFKCMEALGMESGEIHSDQITASSQYSTNWSAERSRLNYPENGWTPGEDSYREWIQVDLGLLRFVTAVGTQGAISKETKKKYYVKTYKIDVSSNGEDWITIEEGNKPVLFQGNTNPTDVVVAVFPKPLITRFVRIKPATWETGISMRFEVYGCGAPAPAGAPAPAGAPAPAGAPAPACMEALGMESGEIHSDQITASSQYSTNWSAERSRLNYPENGWTPGEDSYREWIQVDLGLLRFVTAVGTQGAISKETKKKYYVKTYKIDVSSNGEDWITIEEGNKPVLFQGNTNPTDVVVAVFPKPLITRFVRIKPATWETGISMRFEVYGCGAPAPAGAPAPAGAPAPAGAPAPACMEALGMESGEIHSDQITASSQYSTNWSAERSRLNYPENGWTPGEDSYREWIQVDLGLLRFVTAVGTQGAISKETKKKYYVKTYKIDVSSNGEDWITIEEGNKPVLFQGNTNPTDVVVAVFPKPLITRFVRIKPATWETGISMRFEVYGCGAPAPAGAPAPAGAPAPAGAPAPAEPKSCDKTHTCPPCPAPELLGGPSVFLFPPKPKDTLMISRTPEVTCVVVDVSHEDPEVKFNWYVDGVEVHNAKTKPREEQYNSTYRVVSVLTVLHQDWLNGKEYKCKVSNKALPAPIEKTISKAKGQPREPQVYTLPPSRDELTKNQVSLTCLVKGFYPSDIAVEWESNGQPENNYKTTPPVLDSDGSFFLYSKLTVDKSRWQQGNVFSCSVMHEALHNHYTQKSLSLSPGK

SEQ ID NO: 198 - protein, 588 aa, Artificial Sequence
  Artificial Sequence
EDFKCMEALGMESGEIHSDQITASSQYSTNWSAERSRLNYPENGWTPGEDSYREWIQVDLGLLRFVTAVGTQGAISKETKKKYYVKTYKIDVSSNGEDWITIEEGNKPVLFQGNTNPTDVVVAVFPKPLITRFVRIKPATWETGISMRFEVYGCGAPAPAGAPAPAGAPAPAGAPAPAEPKSCDKTHTCPPCPAPELLGGPSVFLFPPKPKDTLMISRTPEVTCVVVDVSHEDPEVKFNWYVDGVEVHNAKTKPREEQYNSTYRVVSVLTVLHQDWLNGKEYKCKVSNKALPAPIEKTISKAKGQPREPQVYTLPPSRDELTKNQVSLTCLVKGFYPSDIAVEWESNGQPENNYKTTPPVLDSDGSFFLYSKLTVDKSRWQQGNVFSCSVMHEALHNHYTQKSLSLSPGKGAPAPAGAPAPAGAPAPAGAPAPACMEALGMESGEIHSDQITASSQYSTNWSAERSRLNYPENGWTPGEDSYREWIQVDLGLLRFVTAVGTQGAISKETKKKYYVKTYKIDVSSNGEDWITIEEGNKPVLFQGNTNPTDVVVAVFPKPLITRFVRIKPATWETGISMRFEVYGCEVEA

SEQ ID NO: 199 - protein, 586 aa, Artificial Sequence
  Artificial Sequence
ENFQCNVPLGMESGRIANEQISASSTYSDGRWTPQQSRLHGDDNGWTPNLDSNKEYLQVDLRFLTMLTAIATQGAISRETQNGYYVKSYKLEVSTNGEDWMVYEHGKNHKVFQANNDATEVVLNKLHAPLLTRFVRIRPQTWHSGIALRLELFGCGAPAPAGAPAPAGAPAPAGAPAPACNVPLGMESGRIANEQISASSTYSDGRWTPQQSRLHGDDNGWTPNLDSNKEYLQVDLRFLTMLTAIATQGAISRETQNGYYVKSYKLEVSTNGEDWMVYEHGKNHKVFQANNDATEVVLNKLHAPLLTRFVRIRPQTWHSGIALRLELFGCGAPAPAGAPAPAGAPAPAGAPAPAEPKSCDKTHTCPPCPAPELLGGPSVFLFPPKPKDTLMISRTPEVTCVVVDVSHEDPEVKFNWYVDGVEVHNAKTKPREEQYNSTYRVVSVLTVLHQDWLNGKEYKCKVSNKALPAPIEKTISKAKGQPREPQVYTLPPSRDELTKNQVSLTCLVKGFYPSDIAVEWESNGQPENNYKTTPPVLDSDGSFFLYSKLTVDKSRWQQGNVFSCSVMHEALHNHYTQKSLSLSPGK

SEQ ID NO: 200 - protein, 761 aa, Artificial Sequence
  Artificial Sequence
ENFQCNVPLGMESGRIANEQISASSTYSDGRWTPQQSRLHGDDNGWTPNLDSNKEYLQVDLRFLTMLTAIATQGAISRETQNGYYVKSYKLEVSTNGEDWMVYEHGKNHKVFQANNDATEVVLNKLHAPLLTRFVRIRPQTWHSGIALRLELFGCGAPAPAGAPAPAGAPAPAGAPAPACNVPLGMESGRIANEQISASSTYSDGRWTPQQSRLHGDDNGWTPNLDSNKEYLQVDLRFLTMLTAIATQGAISRETQNGYYVKSYKLEVSTNGEDWMVYEHGKNHKVFQANNDATEVVLNKLHAPLLTRFVRIRPQTWHSGIALRLELFGCGAPAPAGAPAPAGAPAPAGAPAPACNVPLGMESGRIANEQISASSTYSDGRWTPQQSRLHGDDNGWTPNLDSNKEYLQVDLRFLTMLTAIATQGAISRETQNGYYVKSYKLEVSTNGEDWMVYEHGKNHKVFQANNDATEVVLNKLHAPLLTRFVRIRPQTWHSGIALRLELFGCGAPAPAGAPAPAGAPAPAGAPAPAEPKSCDKTHTCPPCPAPELLGGPSVFLFPPKPKDTLMISRTPEVTCVVVDVSHEDPEVKFNWYVDGVEVHNAKTKPREEQYNSTYRVVSVLTVLHQDWLNGKEYKCKVSNKALPAPIEKTISKAKGQPREPQVYTLPPSRDELTKNQVSLTCLVKGFYPSDIAVEWESNGQPENNYKTTPPVLDSDGSFFLYSKLTVDKSRWQQGNVFSCSVMHEALHNHYTQKSLSLSPGK

SEQ ID NO: 201 - protein, 590 aa, Artificial Sequence
  Artificial Sequence
ENFQCNVPLGMESGRIANEQISASSTYSDGRWTPQQSRLHGDDNGWTPNLDSNKEYLQVDLRFLTMLTAIATQGAISRETQNGYYVKSYKLEVSTNGEDWMVYEHGKNHKVFQANNDATEVVLNKLHAPLLTRFVRIRPQTWHSGIALRLELFGCGAPAPAGAPAPAGAPAPAGAPAPAEPKSCDKTHTCPPCPAPELLGGPSVFLFPPKPKDTLMISRTPEVTCVVVDVSHEDPEVKFNWYVDGVEVHNAKTKPREEQYNSTYRVVSVLTVLHQDWLNGKEYKCKVSNKALPAPIEKTISKAKGQPREPQVYTLPPSRDELTKNQVSLTCLVKGFYPSDIAVEWESNGQPENNYKTTPPVLDSDGSFFLYSKLTVDKSRWQQGNVFSCSVMHEALHNHYTQKSLSLSPGKGAPAPAGAPAPAGAPAPAGAPAPACNVPLGMESGRIANEQISASSTYSDGRWTPQQSRLHGDDNGWTPNLDSNKEYLQVDLRFLTMLTAIATQGAISRETQNGYYVKSYKLEVSTNGEDWMVYEHGKNHKVFQANNDATEVVLNKLHAPLLTRFVRIRPQTWHSGIALRLELFGCDWTD

SEQ ID NO: 202 - protein, 1057 aa, Artificial Sequence
  N1(a1a2b1b2c)-Fc ECD domain
FRNDKCGDTIKIESPGYLTSPGYPHSYHPSEKCEWLIQAPDPYQRIMINFNPHFDLEDRDCKYDYVEVFDGENENGHFRGKFCGKIAPPPVVSSGPFLFIKFVSDYETHGAGFSIRYEIFKRGPECSQNYTTPSGVIKSPGFPEKYPNSLECTYIVFVPKMSEIILEFESFDLEPDSNPPGGMFCRYDRLEIWDGFPDVGPHIGRYCGQKTPGRIRSSSGILSMVFYTDSAIAKEGFSANYSVLQSSVSEDFKCMEALGMESGEIHSDQITASSQYSTNWSAERSRLNYPENGWTPGEDSYREWIQVDLGLLRFVTAVGTQGAISKETKKKYYVKTYKIDVSSNGEDWITIKEGNKPVLFQGNTNPTDVVVAVFPKPLITRFVRIKPATWETGISMRFEVYGCKITDYPCSGMLGMVSGLISDSQITSSNQGDRNWMPENIRLVTSRSGWALPPAPHSYINEWLQIDLGEEKIVRGIIIQGGKHRENKVFMRKFKIGYSNNGSDWKMIMDDSKRKAKSFEGNNNYDTPELRTFPALSTRFIRIYPERATHGGLGLRMELLGCEVEAPTAGPTTPNGNLVDECDDDQANCHSGTGDDFQLTGGTTVLATEKPTVIDSTIQSEFPTYGFNCEFGWGSHKTFCHWEHDNHVQLKWSVLTSKTGPIQDHTGDGNFIYSQADENQKGKVARLVSPVVYSQNSAHCMTFWYHMSGSHVGTLRVKLRYQKPEEYDQLVWMAIGHQGDHWKEGRVLLHKSLKLYQVIFEGEIGKGNLGGIAVDDISINNHISQEDCAKPADLDKKNPEIKIDETGSTPGYEGEGEGDKNISRKPGNVLKTLDPECPPCPAPPVAGPSVFLFPPKPKDTLMISRTPEVTCVVVDVSHEDPEVQFNWYVDGVEVHNAKTKPREEQFNSTFRVVSVLTVVHQDWLNGKEYKCKVSNKGLPAPIEKTISKTKGQPREPQVYTLPPSREEMTKNQVSLTCLVKGFYPSDISVEWESNGQPENNYKTTPPMLDSDGSFFLYSKLTVDKSRWQQGNVFSCSVMHEALHNHYTQKSLSLSPGK

SEQ ID NO: 203 - protein, 596 aa, Artificial Sequence
  Artificial Sequence
EDFKCMEALGMESGEIHSDQITASSQYSTNWSAERSRLNYPENGWTPGEDSYREWIQVDLGLLRFVTAVGTQGAISKETKKKYYVKTYKIDVSSNGEDWITIKEGNKPVLFQGNTNPTDVVVAVFPKPLITRFVRIKPATWETGISMRFEVYGCKITDYPCSGMLGMVSGLISDSQITSSNQGDRNWMPENIRLVTSRSGWALPPAPHSYINEWLQIDLGEEKIVRGIIIQGGKHRENKVFMRKFKIGYSNNGSDWKMIMDDSKRKAKSFEGNNNYDTPELRTFPALSTRFIRIYPERATHGGLGLRMELLGCGGGGSGGGGSEPKSCDKTHTCPPCPAPELLGGPSVFLFPPKPKDTLMISRTPEVTCVVVDVSHEDPEVKFNWYVDGVEVHNAKTKPREEQYASTYRVVSVLAVLHQDWLNGKEYKCKVSNKALPAPIEKTISKAKGQPREPQVYTLPPSRDELTKNQVSLTCLVKGFYPSDIAVAWESNGQPENNYKTTPPVLDSDGSFFLYSKLTVDKSRWQQGNVFSCSVMHEALHAHYTQKSLSLSPGKGGGGSGGGGSEEQAKTFLDKFNHEAEDLFYQSSGLGKGDFR

SEQ ID NO: 204 - protein, 596 aa, Artificial Sequence
  Artificial Sequence
EDFKCMEALGMESGEIHSDQITASSQYSTNWSAERSRLNYPENGWTPGEDSYREWIQVDLGLLRFVTAVGTQGAISKETKKKYYVKTYEIDVSSNGEDWITIEEGNKPVLFQGNTNPTDVVVAVFPKPLITRFVRIKPATWETGISMRFEVYGCKITDYPCSGMLGMVSGLISDSQITSSNQGDRNWMPENIRLVTSRSGWALPPAPHSYINEWLQIDLGEEKIVRGIIIQGGKHRENKVFMEEFEIGYSNNGSDWKMIMDDSKRKAKSFEGNNNYDTPELRTFPALSTRFIRIYPERATHGGLGLRMELLGCGGGGSGGGGSEPKSCDKTHTCPPCPAPELLGGPSVFLFPPKPKDTLMISRTPEVTCVVVDVSHEDPEVKFNWYVDGVEVHNAKTKPREEQYNSTYRVVSVLTVLHQDWLNGKEYKCKVSNKALPAPIEKTISKAKGQPREPQVYTLPPSRDELTKNQVSLTCLVKGFYPSDIAVEWESNGQPENNYKTTPPVLDSDGSFFLYSKLTVDKSRWQQGNVFSCSVMHEALHNHYTQKSLSLSPGKGGGGSGGGGSEEQAKTFLDKFNHEAEDLFYQSSGLGKGDFR

SEQ ID NO: 205 - protein, 647 aa, Artificial Sequence
  Artificial Sequence
EDFKCMEALGMESGEIHSDQITASSQYSTNWSAERSRLNYPENGWTPGEDSYREWIQVDLGLLRFVTAVGTQGAISKETKKKYYVKTYKIDVSSNGEDWITIKEGNKPVLFQGNTNPTDVVVAVFPKPLITRFVRIKPATWETGISMRFEVYGCKITDYPCSGMLGMVSGLISDSQITSSNQGDRNWMPENIRLVTSRSGWALPPAPHSYINEWLQIDLGEEKIVRGIIIQGGKHRENKVFMRKFKIGYSNNGSDWKMIMDDSKRKAKSFEGNNNYDTPELRTFPALSTRFIRIYPERATHGGLGLRMELLGCGGGGSGGGGSEPKSCDKTHTCPPCPAPELLGGPSVFLFPPKPKDTLMISRTPEVTCVVVDVSHEDPEVKFNWYVDGVEVHNAKTKPREEQYNSTYRVVSVLTVLHQDWLNGKEYKCKVSNKALPAPIEKTISKAKGQPREPQVYTLPPSRDELTKNQVSLTCLVKGFYPSDIAVEWESNGQPENNYKTTPPVLDSDGSFFLYSKLTVDKSRWQQGNVFSCSVMHEALHNHYTQKSLSLSPGKGGGGSGGGGSGGGGSEEQAKTFLDKFNHEAEDLFYQSSGLGKGDFRGGGGSGGGGSGGGGSEEQAKTFLDKFNHEAEDLFYQSSGLGKGDFR

SEQ ID NO: 206 - protein, 561 aa, Artificial Sequence
  Artificial Sequence
EDFKCMEALGMESGEIHSDQITASSQYSTNWSAERSRLNYPENGWTPGEDSYREWIQVDLGLLRFVTAVGTQGAISKETKKKYYVKTYKIDVSSNGEDWITIKEGNKPVLFQGNTNPTDVVVAVFPKPLITRFVRIKPATWETGISMRFEVYGCKITDYPCSNMLGMLSGLIADSQISASSTQEYLWSPSAARLVSSRSGWFPRIPQAQPGEEWLQVDLGTPKTVKGVIIQGARGGDSITAVEARAFVRKFKVSYSLNGKDWEYIQDPRTQQPKLFEGNMHYDTPDIRRFDPIPAQYVRVYPERWSPAGIGMRLEVLGCGGGGSGGGGSEPKSCDKTHTCPPCPAPELLGGPSVFLFPPKPKDTLMISRTPEVTCVVVDVSHEDPEVKFNWYVDGVEVHNAKTKPREEQYNSTYRVVSVLTVLHQDWLNGKEYKCKVSNKALPAPIEKTISKAKGQPREPQVYTLPPSRDELTKNQVSLTCLVKGFYPSDIAVEWESNGQPENNYKTTPPVLDSDGSFFLYSKLTVDKSRWQQGNVFSCSVMHEALHNHYTQKSLSLSPGK

SEQ ID NO: 207 - protein, 556 aa, Artificial Sequence
  Artificial Sequence
ENFQCNVPLGMESGRIANEQISASSTYSDGRWTPQQSRLHGDDNGWTPNLDSNKEYLQVDLRFLTMLTAIATQGAISRETQNGYYVKSYKLEVSTNGEDWMVYRHGKNHKVFQANNDATEVVLNKLHAPLLTRFVRIRPQTWHSGIALRLELFGCRVTDAPCSGMLGMVSGLISDSQITSSNQGDRNWMPENIRLVTSRSGWALPPAPHSYINEWLQIDLGEEKIVRGIIIQGGKHRENKVFMRKFKIGYSNNGSDWKMIMDDSKRKAKSFEGNNNYDTPELRTFPALSTRFIRIYPERATHGGLGLRMELLGCGGGGSGGGGSEPKSCDKTHTCPPCPAPELLGGPSVFLFPPKPKDTLMISRTPEVTCVVVDVSHEDPEVKFNWYVDGVEVHNAKTKPREEQYNSTYRVVSVLTVLHQDWLNGKEYKCKVSNKALPAPIEKTISKAKGQPREPQVYTLPPSRDELTKNQVSLTCLVKGFYPSDIAVEWESNGQPENNYKTTPPVLDSDGSFFLYSKLTVDKSRWQQGNVFSCSVMHEALHNHYTQKSLSLSPGK

SEQ ID NO: 208 - protein, 561 aa, Artificial Sequence
  Artificial Sequence
EDFKCMEALGMESGEIHSDQITASSQASTNWSAERSRLNYPENGWTPGEDSYREWIQVDLGLLRFVTAVGTQGAIAKETKKKAYVKTYKIDVSSNGEDWITIKEGNKPVLFQGNTNPTDVVVAVFPKPLITRFVRIKPATWETGISMRFEVYGCKITDYPCSNMLGMLSGLIADSQISASSTQEYLWSPSAARLVSSRSGWFPRIPQAQPGEEWLQVDLGTPKTVKGVIIQGARGGDSITAVEARAFVRKFKVSYSLNGKDWEYIQDPRTQQPKLFEGNMHYDTPDIRRFDPIPAQYVRVYPERWSPAGIGMRLEVLGCGGGGSGGGGSEPKSCDKTHTCPPCPAPELLGGPSVFLFPPKPKDTLMISRTPEVTCVVVDVSHEDPEVKFNWYVDGVEVHNAKTKPREEQYNSTYRVVSVLTVLHQDWLNGKEYKCKVSNKALPAPIEKTISKAKGQPREPQVYTLPPSRDELTKNQVSLTCLVKGFYPSDIAVEWESNGQPENNYKTTPPVLDSDGSFFLYSKLTVDKSRWQQGNVFSCSVMHEALHNHYTQKSLSLSPGK

SEQ ID NO: 209 - protein, 558 aa, Artificial Sequence
  Artificial Sequence
ENFQCNVPLGMESGRIANEQISASSTYSDGRWTPQQSRLHGDDNGWTPNLDSNKEYLQVDLRFLTMLTAIATQGAISRETQNGYYVKSYKLEVSTNGEDWMVYRHGKNHKVFQANNDATEVVLNKLHAPLLTRFVRIRPQTWHSGIALRLELFGCRVTDAPCSNMLGMLSGLIADSQISASSTQEYLWSPSAARLVSSRSGWFPRIPQAQPGEEWLQVDLGTPKTVKGVIIQGARGGDSITAVEARAFVRKFKVSYSLNGKDWEYIQDPRTQQPKLFEGNMHYDTPDIRRFDPIPAQYVRVYPERWSPAGIGMRLEVLGCGGGGSGGGGSERKCCVECPPCPAPPVAGPSVFLFPPKPKDTLMISRTPEVTCVVVDVSHEDPEVQFNWYVDGVEVHNAKTKPREEQFNSTFRVVSVLTVVHQDWLNGKEYKCKVSNKGLPAPIEKTISKTKGQPREPQVYTLPPSREEMTKNQVSLTCLVKGFYPSDIAVEWESNGQPENNYKTTPPMLDSDGSFFLYSKLTVDKSRWQQGNVFSCSVMHEALHNHYTQKSLSLSPGK

We claim:

1. A polypeptide comprising:
(a) a b1 domain, or a derivative or fragment thereof, of a neuropilin; and
(b) an immunoglobulin domain;
wherein the b1 domain is capable of binding to a coat protein of a virus

2. The polypeptide of claim 1, further comprising an ACE2 domain, or a derivative or a fragment thereof, of an angiotensin converting enzyme 2.

3. A polypeptide comprising:
(a) an ACE2 domain, or a derivative or a fragment thereof, of an angiotensin converting enzyme 2; and
(b) an immunoglobulin domain;
wherein the ACE2 domain is capable of binding to a coat protein of a virus selected from the group consisting of herpesviridae, papillomaviridae, coronaviridae, flaviviridae, togaviridae, bornaviridae, bunyaviridae, filoviridae, orthomyxoviridae, paramyxoviridae, pneumoviridae, and retroviridae.

4. The polypeptide of claim 3, further comprising a b1 domain, or a derivative or fragment thereof, of a neuropilin.

5. A polypeptide comprising:
(a) a b1 domain, or a derivative or fragment thereof, of a neuropilin; and
(b) an ACE2 domain, or a derivative or fragment thereof, of angiotensin converting enzyme 2;
wherein the b1 domain and ACE2 domain are each capable of binding to a coat protein of a virus selected from the group consisting of herpesviridae, papillomaviridae, coronaviridae, flaviviridae, togaviridae, bornaviridae, bunyaviridae, filoviridae, orthomyxoviridae, paramyxoviridae, pneumoviridae, and retroviridae.

6. The polypeptide of claim 5, further comprising an immunoglobulin domain.

7. The polypeptide of any of claims 1-2 and 4-6, wherein the b1 domain, or derivative or fragment thereof, comprises the amino acid sequence of SEQ ID. NOS: SEQ ID No. 3 (NRP1 b1) or SEQ ID NO. 11 (NRP2 b1).

8. The polypeptide of any of claims 1-2 and 4-7, wherein the b1 domain, or derivative or fragment thereof, comprises the amino acid sequence of SEQ ID NO: 3.

9. The polypeptide of any of claims 1-8, wherein the polypeptide is capable of binding to a coat protein of a coronaviridae virus.

10. The polypeptide of claim 9, wherein the polypeptide is capable of binding to a coat protein of COVID-19.

11. The polypeptide of claim 10, wherein the coat protein is an S protein of COVID-19.

12. The polypeptide of any of claims 1-2 and 4-11, wherein the b1 domain, or derivative or fragment thereof, comprises a mutation that enhances the affinity for an S protein of COVID-19 when compared with the unmutated b1 domain.

13. The polypeptide of claim 12, wherein the b1 domain, or derivative or fragment thereof, comprises a mutation at a position selected from the group consisting of E319 and K351.

14. The polypeptide of claim 13, wherein the b1 domain comprises the amino acid sequence of any of SEQ ID. NOS: SEQ ID NO. 4 (NRP1 b1 E319A) and SEQ ID NO. 5 (NRP1 b1 K351A).

15. The polypeptide of any of claims 1-2 and 4-14, wherein the polypeptide contains a plurality of b1 domains, or derivatives or fragments thereof.

16. The polypeptide of any of claims 1-2 and 4-15, wherein the b1 domain, or derivative or fragment thereof, further comprises a linker, a b2 domain of neuropilin, or a combination thereof.

17. The polypeptide of claim 16, wherein the b1 domain, or derivative or fragment thereof, is selected from the group consisting of SEQ ID NOS: SEQ ID NO. 7-SEQ ID NO. 14.

18. The polypeptide of any of claim 2-17, wherein the ACE2 domain, or derivative or fragment thereof comprises a sequence selected from the group consisting of SEQ ID NOS: SEQ ID NO. 38-SEQ ID NO. 39.

19. The polypeptide of any of claim 2-18, wherein the polypeptide comprises a plurality of ACE2 domains, or derivatives or fragments thereof.

20. The polypeptide of any of claims 2-20, wherein the ACE2 domain contains a mutation at a position selected from the group consisting of F28, D30, and L79.

21. The polypeptide of claim 20, wherein the ACE2 domain, derivative or fragment thereof comprises the amino acid sequence of SEQ ID. NOs: SEQ ID NO. 40-SEQ ID NO. 43.

22. The polypeptide of any of claims 2-6 and 15-16, further comprising a linker between the b1 domain and ACE2 domain.

23. The polypeptide of claim 22, wherein the linker is selected from the group consisting of SEQ ID NOs: 44-50.

24. The polypeptide of any of claims 1-4 and 6-23, wherein the immunoglobulin domain comprises a Fc domain.

25. The polypeptide of any of claims 1-4 and 6-24, wherein the immunoglobulin domain consists essentially of a Fc domain.

26. The polypeptide of any of claims 24 and 25, wherein the Fc domain contains a mutation that reduces ADCC when compared with a wildtype Fc domain.

27. The polypeptide of claim 26, wherein the mutation is at position N297 as determined by KABAT numbering.

28. The polypeptide of any of claims 24 and 25, wherein the Fc domain contains one or more mutations that enhance affinity for a FcRn when compared with a wildtype Fc domain.

29. The polypeptide of claim 28, wherein the mutation is at a position selected from the group consisting of T307, E380, and N434 as determined by KABAT numbering, or combinations thereof.

30. The polypeptide of any of claims 24 and 25, wherein the Fc domain contains a mutation that reduces affinity for Fcγ receptor subtypes when compared with a wildtype Fc domain.

31. The polypeptide of claim 30, wherein the mutation is at a position selected from the group consisting of L324 and L325 as determined by KABAT numbering, or combinations thereof.

32. The polypeptide of any of claims 18-21, wherein the Fc domain is selected from the group consisting of human IgG1, human IgG2, human IgG3, human IgG4, and human IgA.

33. The polypeptide of claim 32, wherein the Fc domain comprises the amino acid sequence selected from the group consisting of SEQ ID. NOs: 23-31.

34. The polypeptide of claim 32, wherein the Fc domain sequence comprises the amino acid sequence of SEQ ID. NOS: 23, 30, or 31.

35. The polypeptide of any of claims 2, 4, and 6, wherein the polypeptide has a configuration selected from the group consisting of:
i. (b1), IgG1 WT, ACE2-1;
ii. (b1b2), IgG1 (T307A/E380A/N434A), ACE2-2;
iii. (b1b1)-(G4S)*2-(b1b1), IgG1 (N297A), ACE2-3;
iv. (b1b2)-(G4S)*2-(b1b2), IgG1 (L324A/L325A), ACE2-4;
v. (b1b2)-(G4S)*2-(b1b2) with b1 (E319A), IgG1 (N297A/T307A/E380A/N434A), ACE2-5; and
vi. (b1b2)-(G4S)*2-(b1b2) with b1 (K351A), IgG1 (L324A/L325A/T307A/E380A/N434A), ACE2-6.

36. The polypeptide of any of claims 2, 4, and 6, wherein the polypeptide comprises the amino acid sequence selected from the group consisting of SEQ ID. NOS: 88-110.

37. The polypeptide of any of claims 1-2, 4, and 6, wherein the b1 domain is attached to the C-terminus of the Fc domain.

38. The polypeptide of any of claims 1-2, 4, and 6, wherein the b1 domain is attached to the N-terminus of the Fc domain.

39. The polypeptide of any of claims 2, 3-4, and 6, wherein the ACE2 domain is attached to the C-terminus of the Fc domain.

40. The polypeptide of any of claims 2, 3-4, and 6, wherein the ACE2 domain is attached to the N-terminus of the Fc domain.

41. The polypeptide of any of claims 1-40, further comprising a signal peptide.

42. The polypeptide of claim 41, wherein the signal peptide comprises the SEQ ID NO. 51.

43. A method of producing the polypeptide of any of claims 1-42, the method comprising recombinantly expressing a nucleic acid vector encoding the polypeptide in a host cell.

44. A pharmaceutical composition comprising the polypeptide of any of claims 1-42 and a pharmaceutically acceptable excipient.

45. A method of reducing COVID infection, the method comprising the administration of the polypeptides of any of claims 1-42 to a subject in need thereof.

46. A method of treating a subject suffering from COVID infection, the method comprising the administration of the polypeptides of any of claims 1-42 to a subject in need thereof.

47. A method of preventing COVID infection, the method comprising the administration of the polypeptides of any of claims 1-42 to a subject in need thereof.

48. A method of reducing symptoms of a COVID infection, the method comprising the administration of the polypeptides of any of claims 1-42 to a subject in need thereof.

49. A method of reducing transmission of a COVID infection, the method comprising the administration of the polypeptides of any of claims 1-42 to a subject in need thereof.

50. A recombinant polypeptide comprising:
(a) one or more mutant neuropilin (NRP) domains, or fragments thereof, and
(b) an immunoglobulin domain;
wherein the one or more mutant NRP domains result in reduced binding of the recombinant polypeptide to heparin or heparan sulfate relative to a wild-type NRP domain.

51. The recombinant polypeptide of claim 50, wherein the one or more mutant NRP domains are derived from an NRP1 or an NRP2 protein.

52. The recombinant polypeptide of claim 50, wherein the one or more mutant NRP domains are one or more mutant b1 domains, or one or more mutant b2 domains.

53. The recombinant polypeptide of claim 50, wherein the one or more mutant NRP domains has one or more amino substitutions selected from groups consisting of: K373E, K351A, E319A, K358E, R513E, K514E, K516E, R513A, K514A, K516A, Y297A, S345A, and Y353A, relative to the wild-type amino acid sequence set forth in SEQ ID NO: 1.

54. The recombinant polypeptide of claim 50, wherein the one or more mutant NRP domains result in reduced binding of the recombinant polypeptide to heparin.

55. The recombinant polypeptide of claim 50, wherein the one or more mutant NRP domains result in reduced binding of the recombinant polypeptide to heparan sulfate.

56. The recombinant polypeptide of claim 50, wherein the immunoglobin domain is an Fc domain.

57. A recombinant polypeptide comprising:
(a) one or more mutant neuropilin (NRP) b1 domains, NRP b2 domains, or fragments thereof, and
(b) an Fc domain;
wherein the one or more mutant NRP b1 domains, NRP b2 domains, or fragments thereof are derived from an NRP1 or an NRP2 protein;
wherein the one or more mutant NRP b1 domains, NRP b2 domains, or fragments thereof
have one or more amino substitutions selected from groups consisting of: K373E, K351A, E319A, K358E, R513E, K514E, K516E, R513A, K514A, K516A, Y297A, S345A, and Y353A, relative to the wild-type amino acid sequence set forth in SEQ ID NO: 1; and
wherein the one or more one or more amino substitutions result in reduced binding of the recombinant polypeptide to heparin or heparan sulfate.

58. A recombinant polypeptide comprising:
(a) one or more mutant neuropilin (NRP) b1 domains (b1), NRP b2 domains (b2), or fragments thereof; and
(b) an Fc domain;
wherein (a) and (b) comprise a construct having an orientation of: b1-Fc; b1b1-Fc;
b1b1b1-Fc; b1-Fc; b1b1b1-Fc; b1b2-Fc; b1b2-Fc; b1b2-Fc; b1b2-Fc; Fc-b1b2; Fc-b1b2; b1-Fc-b1; b1b1-Fc-b1; b1-Fc; b1b1-Fc; b1b1b1-Fc; b1-Fc; b1b1b1-Fc; b1-Fc; b1b1b1-Fc; b1b2-Fc; b1b2-Fc; Fc-b1b2; Fc-b1b2; b1-Fc-b1; b1b1-Fc-b1;
wherein the one or more b1, b2, or fragments thereof, are derived from an NRP1 or an NRP2 protein;
wherein the one or more b1, b2, or fragments thereof have one or more amino substitutions selected from groups consisting of: K373E, K351A, E319A, K358E, R513E, K514E, K516E, R513A, K514A, K516A, Y297A, S345A, and Y353A, relative to the wild-type amino acid sequence set forth in SEQ ID NO: 1; and
wherein the one or more one or more amino substitutions result in reduced binding of the recombinant polypeptide to heparin or heparan sulfate.

59. A recombinant polypeptide comprising:
(a) one or more mutant neuropilin (NRP) domains, or fragments thereof, and
(b) an immunoglobulin domain;
wherein the recombinant polypeptide is operable to bind to virus having an —Z₁-X₁-X₂—Z₂- (CendR) motif, wherein Z₁ and Z₂ are arginine or lysine, and X₁ and X₂ are any amino acid.

60. The recombinant polypeptide of claim 59, wherein the one or more mutant NRP domains, or fragments thereof, are derived from an NRP1 or an NRP2 protein.

61. The recombinant polypeptide of claim 59, wherein the one or more mutant NRP domains, or fragments thereof, are one or more mutant b1 domains, or one or more mutant b2 domains.

62. The recombinant polypeptide of claim 59, wherein the virus is a virus belonging to the Realm: Duplodnaviria; Monodnaviria; Riboviria; or Varidnaviria.

63. The recombinant polypeptide of claim 59, wherein the virus is a virus belonging to the Kingdom: Bamfordvirae; Heunggongvirae; Orthornavirae; Pararnavirae; or Shotokuvirae.

64. The recombinant polypeptide of claim 59, wherein the virus is a virus belonging to the Phylum: Artverviricota; Cossaviricota; Kitrinoviricota; Negarnaviricota; Nucleocytoviricota; Peploviricota; or Pisuviricota.

65. The recombinant polypeptide of claim 59, wherein the virus is a virus belonging to the Class: Alsuviricetes; Ellioviricetes; Flasuviricetes; Herviviricetes; Insthoviricetes; Monjiviricetes; Papovaviricetes; Pisoniviricetes; Pokkesviricetes; Revtraviricetes; or Stelpaviricetes.

66. The recombinant polypeptide of claim 59, wherein the virus is a virus belonging to the Order: Amarillovirales; Articulavirales; Bunyavirales; Chitovirales; Hepelivirales; Herpesvirales; Jingchuvirales; Martellivirales; Mononegavirales; Nidovirales; Ortervirales; Stellavirales; or Zurhausenvirales.

67. The recombinant polypeptide of claim 59, wherein the virus is a virus belonging to the Family: Astroviridae; Bunyaviridae; Bornaviridae; Chuviridae; Coronaviridae; Flaviviridae; Filoviridae; Hantaviridae; Hepeviridae; Herpesviridae; Nairoviridae; Orthomyxoviridae; Papillomaviridae; Paramyxoviridae; Peribunyaviridae; Phenuiviridae; Pneumoviridae; Poxviridae; Retroviridae; Rhabdoviridae; or Togaviridae.

68. The recombinant polypeptide of claim 59, wherein the virus is selected from the group consisting of: Dengue; respiratory syncytial virus (RSV); Hantavirus; Epstein-Barr virus (EBV); EBV (uncleaved); SARS-CoV-2 Wuhan; SARS-CoV-2 Wuhan (uncleaved); SARS-CoV-2 UK; SARS-CoV-2 India; SARS-CoV-2 India (uncleaved); HCoV-OC43; MERS-CoV; MERS-CoV (uncleaved); Herpes simplex virus (HSV) 1; HSV 1 (uncleaved); influenza A H5N1 virus (IAV H5N1); human papillomavirus (HPV); Human Metapneumovirus; and human immunodeficiency virus (HIV).

69. The recombinant polypeptide of claim 59, wherein the virus has a CendR motif selected from the group consisting of:
GTCTQSGERRREKR;
KNTNVTLSKKRKRR;
LTHKMIEESHRLRR;
VSFKPPPPPSRRRR;
VSFKPPPPPSRRRRGACVVY;
CASYQTQTNSPRRAR;
CASYQTQTNSPRRARSVASQSIIAYTMSLG;
ASYQTQTNSHRRAR;
ASYQTQTNSRRRAR;
ASYQTQTNSRRRARSVASQSIIAY;
GSGYCVDYSKNRRSR;
LLEPVSISTGSRSAR;
LLEPVSISTGSRSARSAIEDLLFDK;
ERPRAPARSASRPRR;
ERPRAPARSASRPRRPV;
VLATGLRNVPQRKKR;
PTTSSTSTTAKRKKR;
IDMLKARVKNRVAR;
AKRRVVQREKR;
and
AKRRVVQREKRAVGIGALFLG.

70. A recombinant polypeptide comprising:
(a) one or more mutant neuropilin (NRP) b1 domains (b1), NRP b2 domains (b2), or fragments thereof; and
(b) an Fc domain;
wherein the one or more b1, b2, or fragments thereof, are derived from an NRP1 or an NRP2 protein;
wherein the recombinant polypeptide is operable to bind to virus having an —Z₁-X₁-X₂-Z₂- (CendR) motif, wherein Z₁ and Z₂ are arginine or lysine, and X₁ and X₂ are any amino acid; and
wherein the virus is selected from the group consisting of: Dengue; respiratory syncytial virus (RSV); Hantavirus; Epstein-Barr virus (EBV); EBV (uncleaved); SARS-CoV-2 Wuhan; SARS-CoV-2 Wuhan (uncleaved); SARS-CoV-2 UK; SARS-CoV-2 India; SARS-CoV-2 India (uncleaved); HCoV-OC43; MERS-CoV; MERS-CoV (uncleaved); Herpes simplex virus (HSV) 1; HSV 1 (uncleaved); influenza A H5N1 virus (IAV H5N1); human papillomavirus (HPV); Human Metapneumovirus; and human immunodeficiency virus (HIV).

71. A recombinant polypeptide comprising:
(a) one or more mutant neuropilin (NRP) b1 domains (b1), NRP b2 domains (b2), or fragments thereof; and
(b) an Fc domain;
wherein the one or more b1, b2, or fragments thereof, are derived from an NRP1 or an NRP2 protein;
wherein the recombinant polypeptide is operable to bind to virus having an —Z₁-X₁-X₂—Z₂- (CendR) motif, wherein Z₁ and Z₂ are arginine or lysine, and X₁ and X₂ are any amino acid; and
wherein the virus has a CendR motif selected from the group consisting of:
GTCTQSGERRREKR;
KNTNVTLSKKRKRR;
LTHKMIEESHRLRR;
VSFKPPPPPSRRRR;
VSFKPPPPPSRRRRGACVVY;
CASYQTQTNSPRRAR;
CASYQTQTNSPRRARSVASQSIIAYTMSLG;
ASYQTQTNSHRRAR;
ASYQTQTNSRRRAR;
ASYQTQTNSRRRARSVASQSIIAY;
GSGYCVDYSKNRRSR;
LLEPVSISTGSRSAR;
LLEPVSISTGSRSARSAIEDLLFDK;
ERPRAPARSASRPRR;
ERPRAPARSASRPRRPV;
VLATGLRNVPQRKKR;
PTTSSTSTTAKRKKR;
IDMLKARVKNRVAR;
AKRRVVQREKR;
and
AKRRVVQREKRAVGIGALFLG.

72. A recombinant polypeptide comprising an amino acid sequence that is at least 90% identical to an amino acid sequence set forth in any one of SEQ ID NOs: 113-116, 121-122, 133-137, 148-149, 154, 162, and 193-201, or a pharmaceutically acceptable salt thereof.

73. A recombinant polypeptide consisting of an amino acid sequence that is at least 90% identical to an amino acid sequence according to set forth in any one of SEQ ID NOs: 113-116, 121-122, 133-137, 148-149, 154, 162, and 193-201, or a pharmaceutically acceptable salt thereof.

74. A recombinant polypeptide consisting of an amino acid sequence set forth in any one of SEQ ID NOs: 113-116, 121-122, 133-137, 148-149, 154, 162, and 193-201, or a pharmaceutically acceptable salt thereof.

75. A method of limiting the occurrence of, reducing the risk of, reducing the severity of, or treating a viral infection, in a subject in need thereof, said method comprising administering to the subject a composition comprising a therapeutically effective amount of a recombinant polypeptide, or a pharmaceutically acceptable salt thereof, comprising
(a) one or more mutant neuropilin (NRP) domains, or fragments thereof, and
(b) an immunoglobulin domain;
wherein the recombinant polypeptide is operable to bind to virus having an —Z₁-X₁-X₂-Z₂- (CendR) motif, wherein Z₁ and Z₂ are arginine or lysine, and X₁ and X₂ are any amino acid.

76. The method of claim 75, wherein the one or more mutant NRP domains, or fragments thereof, are derived from an NRP1 or an NRP2 protein.

77. The method of claim 75, wherein the one or more mutant NRP domains, or fragments thereof, are one or more mutant b1 domains, or one or more mutant b2 domains.

78. The method of claim 75, wherein the virus is a virus belonging to the Realm: Duplodnaviria; Monodnaviria; Riboviria; or Varidnaviria.

79. The method of claim 75, wherein the virus is a virus belonging to the Kingdom: Bamfordvirae; Heunggongvirae; Orthornavirae; Pararnavirae; or Shotokuvirae.

80. The method of claim 75, wherein the virus is a virus belonging to the Phylum: Artverviricota; Cossaviricota; Kitrinoviricota; Negarnaviricota; Nucleocytoviricota; Peploviricota; or Pisuviricota.

81. The method of claim 75, wherein the virus is a virus belonging to the Class: Alsuviricetes; Ellioviricetes; Flasuviricetes; Herviviricetes; Insthoviricetes; Monjiviricetes; Papovaviricetes; Pisoniviricetes; Pokkesviricetes; Revtraviricetes; or Stelpaviricetes.

82. The method of claim 75, wherein the virus is a virus belonging to the Order: Amarillovirales; Articulavirales; Bunyavirales; Chitovirales; Hepelivirales; Herpesvirales; Jingchuvirales; Martellivirales; Mononegavirales; Nidovirales; Ortervirales; Stellavirales; or Zurhausenvirales.

83. The method of claim 75, wherein the virus is a virus belonging to the Family: Astroviridae; Bunyaviridae; Bornaviridae; Chuviridae; Coronaviridae; Flaviviridae; Filoviridae; Hantaviridae; Hepeviridae; Herpesviridae; Nairoviridae; Orthomyxoviridae; Papillomaviridae; Paramyxoviridae; Peribunyaviridae; Phenuiviridae; Pneumoviridae; Poxviridae; Retroviridae; Rhabdoviridae; or Togaviridae.

84. The method of claim 75, wherein the virus is selected from the group consisting of: Dengue; respiratory syncytial virus (RSV); Hantavirus; Epstein-Barr virus (EBV); EBV (uncleaved); SARS-CoV-2 Wuhan; SARS-CoV-2 Wuhan (uncleaved); SARS-CoV-2 UK; SARS-CoV-2 India; SARS-CoV-2 India (uncleaved); HCoV-OC43; MERS-CoV; MERS-CoV (uncleaved); Herpes simplex virus (HSV) 1; HSV 1 (uncleaved); influenza A H5N1 virus (IAV H5N1); human papillomavirus (HPV); Human Metapneumovirus; and human immunodeficiency virus (HIV).

85. The method of claim 75, wherein the virus has a CendR motif selected from the group consisting of:
GTCTQSGERRREKR;
KNTNVTLSKKRKRR;
LTHKMIEESHRLRR;
VSFKPPPPPSRRRR;
VSFKPPPPPSRRRRGACVVY;
CASYQTQTNSPRRAR;
CASYQTQTNSPRRARSVASQSIIAYTMSLG;
ASYQTQTNSHRRAR;
ASYQTQTNSRRRAR;
ASYQTQTNSRRRARSVASQSIIAY;
GSGYCVDYSKNRRSR;
LLEPVSISTGSRSAR;
LLEPVSISTGSRSARSAIEDLLFDK;
ERPRAPARSASRPRR;
ERPRAPARSASRPRRPV;
VLATGLRNVPQRKKR;
PTTSSTSTTAKRKKR;
IDMLKARVKNRVAR;
AKRRVVQREKR;
and
AKRRVVQREKRAVGIGALFLG.

86. A method of limiting the occurrence of, reducing the risk of, reducing the severity of, or treating a viral infection, in a subject in need thereof, said method comprising administering to the subject a composition comprising a therapeutically effective amount of a recombinant polypeptide, or a pharmaceutically acceptable salt thereof, comprising:
(a) one or more mutant neuropilin (NRP) b1 domains (b1), NRP b2 domains (b2), or fragments thereof; and
(b) an Fc domain;
wherein the one or more b1, b2, or fragments thereof, are derived from an NRP1 or an NRP2 protein;
wherein the recombinant polypeptide is operable to bind to virus having an —Z₁-X₁-X₂-Z₂- (CendR) motif, wherein Z₁ and Z₂ are arginine or lysine, and X₁ and X₂ are any amino acid; and
wherein the virus is selected from the group consisting of: Dengue; respiratory syncytial virus (RSV); Hantavirus; Epstein-Barr virus (EBV); EBV (uncleaved); SARS-CoV-2 Wuhan; SARS-CoV-2 Wuhan (uncleaved); SARS-CoV-2 UK; SARS-CoV-2 India; SARS-CoV-2 India (uncleaved); HCoV-OC43; MERS-CoV; MERS-CoV (uncleaved); Herpes simplex virus (HSV) 1; HSV 1 (uncleaved); influenza A H5N1 virus (IAV H5N1); human papillomavirus (HPV); Human Metapneumovirus; and human immunodeficiency virus (HIV).

87. A method of limiting the occurrence of, reducing the risk of, reducing the severity of, or treating a viral infection, in a subject in need thereof, said method comprising administering to the subject a composition comprising a therapeutically effective amount of a recombinant polypeptide, or a pharmaceutically acceptable salt thereof, comprising:
(a) one or more mutant neuropilin (NRP) b1 domains (b1), NRP b2 domains (b2), or fragments thereof; and
(b) an Fc domain;
wherein the one or more b1, b2, or fragments thereof, are derived from an NRP1 or an NRP2 protein;
wherein the recombinant polypeptide is operable to bind to virus having an —Z₁-X₁-X₂-Z₂- (CendR) motif, wherein Z₁ and Z₂ are arginine or lysine, and X₁ and X₂ are any amino acid; and
wherein the virus has a CendR motif selected from the group consisting of:
GTCTQSGERRREKR;
KNTNVTLSKKRKRR;
LTHKMIEESHRLRR;
VSFKPPPPPSRRRR;
VSFKPPPPPSRRRRGACVVY;
CASYQTQTNSPRRAR;
CASYQTQTNSPRRARSVASQSIIAYTMSLG;
ASYQTQTNSHRRAR;
ASYQTQTNSRRRAR;
ASYQTQTNSRRRARSVASQSIIAY;
GSGYCVDYSKNRRSR;
LLEPVSISTGSRSAR;
LLEPVSISTGSRSARSAIEDLLFDK;
ERPRAPARSASRPRR;
ERPRAPARSASRPRRPV;
VLATGLRNVPQRKKR;
PTTSSTSTTAKRKKR;
IDMLKARVKNRVAR;
AKRRVVQREKR;
and
AKRRVVQREKRAVGIGALFLG.

88. A method of limiting the occurrence of, reducing the risk of, reducing the severity of, or treating a viral infection, in a subject in need thereof, said method comprising administering to the subject a composition comprising a therapeutically effective amount of a recombinant polypeptide comprising an amino acid sequence that is at least 90% identical to an amino acid sequence set forth in any one of SEQ ID NOs: 113-116, 121-122, 133-137, 148-149, 154, 162, and 193-201, or a pharmaceutically acceptable salt thereof.

89. A method of limiting the occurrence of, reducing the risk of, reducing the severity of, or treating a viral infection, in a subject in need thereof, said method comprising administering to the subject a composition comprising a therapeutically effective amount of a recombinant polypeptide consisting of an amino acid sequence that is at least 90% identical to an amino acid sequence according to set forth in any one of SEQ ID NOs: 113-116, 121-122, 133-137, 148-149, 154, 162, and 193-201, or a pharmaceutically acceptable salt thereof.

90. A method of limiting the occurrence of, reducing the risk of, reducing the severity of, or treating a viral infection, in a subject in need thereof, said method comprising administering to the subject a composition comprising a therapeutically effective amount of a recombinant polypeptide consisting of an amino acid sequence set forth in any one of SEQ ID NOs: 113-116, 121-122, 133-137, 148-149, 154, 162, and 193-201, or a pharmaceutically acceptable salt thereof.

91. A recombinant polypeptide comprising an amino acid sequence that is at least 90% identical to an amino acid sequence set forth in any one of SEQ ID NOs: 113-116, 121-122, 133-137, 148-149, 154, 162, and 193-201, or a pharmaceutically acceptable salt thereof, and further comprising an excipient.

92. The method of claim 75, wherein the virus is a virus belonging to the Family: Astroviridae; Bunyaviridae; Bornaviridae; Chuviridae; Flaviviridae; Filoviridae; Hantaviridae; Hepeviridae; Herpesviridae; Nairoviridae; Orthomyxoviridae; Papillomaviridae; Paramyxoviridae; Peribunyaviridae; Phenuiviridae; Pneumoviridae; Poxviridae; Retroviridae; Rhabdoviridae; or Togaviridae.

96. The method of claim 75, wherein the virus is selected from the group consisting of Dengue; respiratory syncytial virus (RSV); Hantavirus; Epstein-Barr virus (EBV); EBV (uncleaved); HCoV-OC43; MERS-CoV; MERS-CoV (uncleaved); Herpes simplex virus (HSV) 1; HSV 1 (uncleaved); influenza A H5N1 virus (IAV H5N1); human papillomavirus (HPV); Human Metapneumovirus; and human immunodeficiency virus (HIV).

97. The method of claim 75, wherein the virus has a CendR motif selected from the group consisting of:
GTCTQSGERRREKR;
KNTNVTLSKKRKRR;
LTHKMIEESHRLRR;
VSFKPPPPPSRRRR;
VSFKPPPPPSRRRRGACVVY;
GSGYCVDYSKNRRSR;
LLEPVSISTGSRSAR;
LLEPVSISTGSRSARSAIEDLLFDK;
ERPRAPARSASRPRR;
ERPRAPARSASRPRRPV;
VLATGLRNVPQRKKR;
PTTSSTSTTAKRKKR;
IDMLKARVKNRVAR;
AKRRVVQREKR;
and
AKRRVVQREKRAVGIGALFLG.

98. A method of limiting the occurrence of, reducing the risk of, reducing the severity of, or treating a viral infection, in a subject in need thereof, said method comprising administering to the subject a composition comprising a therapeutically effective amount of a recombinant polypeptide, or a pharmaceutically acceptable salt thereof, comprising:
(a) one or more mutant neuropilin (NRP) b1 domains (b1), NRP b2 domains (b2), or fragments thereof; and
(b) an Fc domain;
wherein the one or more b1, b2, or fragments thereof, are derived from an NRP1 or an NRP2 protein;
wherein the recombinant polypeptide is operable to bind to virus having an —Z₁-X₁-X₂-Z₂- (CendR) motif, wherein Z₁ and Z₂ are arginine or lysine, and X₁ and X₂ are any amino acid; and
wherein the virus is selected from the group consisting of: Dengue; respiratory syncytial virus (RSV); Hantavirus; Epstein-Barr virus (EBV); EBV (uncleaved); HCoV-OC43; MERS-CoV; MERS-CoV (uncleaved); Herpes simplex virus (HSV) 1; HSV 1 (uncleaved); influenza A H5N1 virus (IAV H5N1); human papillomavirus (HPV); Human Metapneumovirus; and human immunodeficiency virus (HIV).

99. A method of limiting the occurrence of, reducing the risk of, reducing the severity of, or treating a viral infection, in a subject in need thereof, said method comprising administering to the subject a composition comprising a therapeutically effective amount of a recombinant polypeptide, or a pharmaceutically acceptable salt thereof, comprising:
(a) one or more mutant neuropilin (NRP) b1 domains (b1), NRP b2 domains (b2), or fragments thereof; and
(b) an Fc domain;
wherein the one or more b1, b2, or fragments thereof, are derived from an NRP1 or an NRP2 protein;
wherein the recombinant polypeptide is operable to bind to virus having an —Z₁-X₁-X₂-Z₂- (CendR) motif, wherein Z₁ and Z₂ are arginine or lysine, and X₁ and X₂ are any amino acid; and
wherein the virus has a CendR motif selected from the group consisting of:
GTCTQSGERRREKR;
KNTNVTLSKKRKRR;
LTHKMIEESHRLRR;
VSFKPPPPPSRRRR;
VSFKPPPPPSRRRRGACVVY;
GSGYCVDYSKNRRSR;
LLEPVSISTGSRSAR;
LLEPVSISTGSRSARSAIEDLLFDK;
ERPRAPARSASRPRR;
ERPRAPARSASRPRRPV;
VLATGLRNVPQRKKR;
PTTSSTSTTAKRKKR;
IDMLKARVKNRVAR;
AKRRVVQREKR;
and
AKRRVVQREKRAVGIGALFLG.

100. The method of any one of claims 92-99, wherein the virus is not SARS-CoV-2.

101. The method of any one of claims 92-99, wherein the virus is not SARS-CoV-2 Wuhan; SARS-CoV-2 Wuhan (uncleaved); SARS-CoV-2 UK; SARS-CoV-2 India; or SARS-CoV-2 India (uncleaved).
